United States Patent Application Publication US 2024/0268394 A1 - sequence listing, part 6

SEQ ID NO: 82 - DNA, 254513 bp, Pseudomonas nodulensis
  misc_feature (180797)..(180823): n is a, c, g, or t
ggggcttgcccccgatggcagtgggtcagtcactgatgagttggctgacacaccgccatcgggggcaagccccctcccacagtttgatcttcatgtatcagttgaagggtggtttgctctggctctggtttttgatcttaggcggccccccaaatcactgtcggattacgggcacaccgagcctaagcgaggtgccgagtgttggggcaagagcgctttggttactttcgcgcttttcgaaagtgacccgccgtaagggcggaaccataagccgccgttaccgaaataacggatatgtactcaaccccagcacccaaaaattggtcacccattcttacccaaaattggctattcctcccccaaggcccgatgactaacctagccatcaatccccaccgccctggagcatcaccatgcaaccccgtaccgatttctacaccgcctccccagacgccatgaaagccatgctcgccctggaagccgccgtcggcaaactgtccatcgaactaccgttgctggaactgatacgcctgcgcgtctcgcagatcaacggctgtgccttctgcctcgacatgcacaccgccgacgcccgcaaaggcggcgagaccgaacgccgcctgtacaccgtgtcggcctggcgtgaaacgccgttcttcaccccgcgtgaacgcgccgcgctggcctgggccgaaagcctgaccctgatcagccatacccacgcaccggatgaagacttcaacgcactggccgccgagttcagcccccaggaacaggtcgacctgagtgtggccatcgccaccatcaacagctggaaccgcctggccgtgggttttcgcaagatgcctaagtaagcctcagaagttgaccgaggcactcaggcgcgccgtcaatggcgcgccctggaacaggtagtcatcgcccatgtactcgcccgcgtcgcgccagtagcgcttgtcgaacaggttgtcgacgctcaggcggaacaccgtctcatagccgtccacttgggtggtatagcggctgcccacattcaccaccgcgtagtcccccacttccacattgccgctgcggttggcgtacttcttggcgctgtattgcactccgcccaataccgccaggccgttcacccacggcaacgcataatcggcatacacactggcgcgcaacttgggcacgttgatcgcctggtggccttcgtagtccggcgtgccgctgccggtcacccgtgcgcgaatcgccgccacgctggttgcgatctgcaggcgttcggtggcccagccgttggccgacaattccagcccggtgttcttttgctcgccctgttgcacgtagtcgaatttaccggtgccatccggcttggcgtactggtaggcctggcgggtctggaatacagcggcggcgaagctgatgcggcgccagtcgtatttcaccccagcttcgatttggcgtgaggtggtcggggcgagcgtttcgtcggtgttgttggcgaaccacggcgcggtgccgcccagggacaggcctttgctgtagctggtatagagcgagatgttctcgacaggtttgtagatcaacgaggcctggggcaggaacacgtactgctgggtatgacgggcctggttgccggtgacgctgtcgaaggccttttcatccaggcgcacttcacgaccgccgaggatggtttgccattgctcgttgaaacggatgcggtctgtaacgaacaggccgtactgacggctgtcgaggttgcggtggctgtcgttcaacggcttgtcagtcggggtaaacgtaggggcgtccacgtcgatgttggtggtgccgatgtattcattgacggatttgcgcttgtcgatcacccggcggaacgcactggtgccaaaggtcagttcatggcccaggccggcggtgtcgaacagcccggtcatggccgcctgcacttcgtcgtcacggcgggtgtcgtcagggctgcggtagtcgtagacgtcgtagttgccttcggggctgaagtagtttggcacgctcgaggtgcaactggtcgagccatagcagccccaggcaaacgagctgtaatcgtcgatcaccaccttgctgcgcgccgcactcacgctgcctttccactggtcgttgaaacggtattcaaacttgccgttgaggttcagcgaatcaatgcccacctgcctggacccactctgatgccccagcagtttcttcggcgaggcaccgtgtggcacctcggtgccgcccagcaactggtagcccggtaccgagcgttgctgcttgttctggtattcggcatccagttgcaacacggcgtcggggctgatgttccagtcgaaggccagggacataaaatcgcgctggccgttggcgtgttccacgtacgcgttgaggtcctcgtgggccacgttggcgcgcaggccgaattgttgctcgctgccgaaccagccgccgacgtcggtggcgatataaccgctgccacgatcgtcggtggagatggtcaccgagcgcacgtcttccgggcgcttggtcacgtagttgatcacgccgctcggctcggagatgccactttgcaggccggccaggcccttgagcacttcgacctgctgcttgttctccagcgcgacgttctgctcgccggtgatggtgcgcccgttgatcttgtagctgctcgccgcattcagcgaaaagccgcgcaccacgaagttctcgtagtagccgatgggcgcatagctgtcgcccaccgaggcgtcgttgcgcagcacttcactgagcaggcgcgcttgctggtccttgatcagtgcggcgttgatcaccgtgatcgaggccggggtgtcgagcagcggtgcctcatcgaagccgcccaccgaagcggtttcgctgcggtagccggattcatcctggccctggaccttcacttccggcagttcaaggtcagccgccaggctgtgaccgatgccgccgctgagcagcaaaccgagggcgaaacgtgaggtgacgacgggacgaaaacgcaaaaccatgggggcagggccttaaagcgcgggcggggggcgcataagctaggcataagtgcgcagttttacaagttcgcgagaatgattcgcggcttgagacatcccgtctcacaccacacgccaatccatccgcgtctcgacagcccgccgggcacctgcgatagacaaggcttccctcatcaattgcaggagaacgccatgagtattgctggaaaagtcgcgctggtgaccggcgccgggcagggcattggccgggccattgccctgcgcctggcacaggacggtgccgatatcgcgctggtggacatcaatggcgccaagcttgaagccgtggccgccgaagtcgtcgcgctgggccgcaaggcctcggtgttcgtcgctgacgtgtccaagcgcgaacaggtggcggcggcggtggagcatgcgcaccagaccctgggtagtttcgacatcatcgtcaacaacgccggggtggcgcagatcgattcgctgttggacgtcagcccggaacaggtcgagcgcaccctgggcatcaacgtgcagggcgtgttgtggggcatccaggccgccggcaagaaattcaaggcgctcaagcagaagggcaagatcatcaacgcctgctccatcgccggccatgaaggttttgcgcttctgggagtgtactcggccaccaagtttgccgtgcgtgccttgacgcaggcggcggccaaggaactggcgagcgccgggattaccgtcaatgcctactgtccgggtgtggtgggcaccgatatgtgggtcgagatcgacaagcgcatggccgagatcaccggtgccgaagtcggtgcgacctacaagaaatacgtggatggcatcgccttgggccgggcgcagacgccggaggatgtggcggggctggtcgcgtacctggccgggccggatgcggactacatgaccgggcaatcgccgctgatcgacgggggccttgtctaccgctgacatctcagatgtacccagtccaatgtgggagggggcttgcccccgatagcagtgtgtcagccactggaagtattagctggtccaccgccatcgggggcaagccccctcccacagtgttgaccccgttgtatcagcgggttttgttcggcatgtcgatgcccagttggttgacgcggcggtacagggtcgcccttgagatccccagcgcctgcgcggtcggtatcggcttccagcgatgccgaatcagcgcatccagcaccacctggcgctccgggctcgcacgatcttccgtcaatgcttcaacctgttccccacgcacctccaccggcaaatccgccacctgcaccgtaccgccctcacacaccgcacaggcatacgccagcacatgccgcagttgccgcacattgcccggccacgcgtaccccaacagcaactccagcgcagcctggccgattcccaccgtgatgccgttgttgcgcgcttcctgttccagcaagcggttgatcagcgccagtttgtcagtgcgttcgcgcaacggcggcaggcagaagcgcgcgcagccgaggcgaaagtacaggtcctcgcgaaagctgccctcactgaccaacaccgacaaatcgcggtggctggcgcagatcacctggatatcgacggtgcgggttttcgcggcgcccagcggcgccacttcaccttcggccatcacccgcagcaggcgcgtctgcaaggccaggggcatgtcgccgatttcatcgaggaacacggtgccgccatcggcctgcaccagcaaccccggcatgcctttgctggcggcgccggtgaaggcgccagccacatagccgaacagctcgctctcaatcaggttttccggaatcgccgcgcagttcaccgccacgaacggcccactgcgtcgggcgctgcgttcgtgcaactggcgggcgaagacttccttgccggcgccggtttcgccttgcaccagtaccggcaggttgcggtccttgacccgcacggccaggcgcaggtgttcctccacacgggcatccaccaagggcaccatgggcgcccgcgccggtttgcgtcgcggcgcgttgacccgcacgtgcagcgcacccggttctcccagccactgcagttgctgggtggactggtcggtgacggcgcgcaaggcgttcaggtcgaacacctcaccgatatgtgccggcacctggccaaagcgccggcgcaaggcctggcgcgccttgctgttcaaggcccgcagacggccgtcctggtcccaggccagcagcaggtcgggctggctgtccacataacccggcgtgctgtgcgcttgcaacacccagtgctggcgggcgctgtgcatgaagaaggcgttctcgatggcctcggcactttgcgccaccaactggcgtatcaggtgctggctgcggcggtcatctggcgatttgagcgccgaggcatccatcactcccagcaggttgccctgggggtcgaagatcggcgcggcggagcaggtcaggccgatgaaggctgcacgaaagtggtcgcgcttgtgcaccgtcaccgccgattgactggtgagcacggtggccacgccgcaagtgccttcttcggcttccgaccagcaggtgccgaggtacaggccggccttgcggcagtcgctgcggatcgaggtgtccacgcggtggtcgatggtctggccctgggcatcggtgagcatcacgcagtagtcggcctggcgcacacggtgatgcagttgcccgacggcttcgccggcaatgcgcatgaacagttcggcgcgttcgcggcattccttgagcaagggttcgctgaggatgcgtggcccctgcagggagccggggtccaggtggtgttgctccatggagcgccgccatgaatcgaagatcagcgacggcaccggcgcctggggcagacgatcagcattgcggaccacgcgactgacgcagtcgacgtgctccctggagttcgcggcgagcataaggcctccggttctcgatctttgttgttatacccgccattaagcgcgcatgcgtcgggtgggacaagcgcggcctgaccaactgcccggtatgagacgcagcgtctcaaaccggctgagacgccgccttcgagttgcaatgccgcgtctcattctgcgacgccggcctgcttgcgacaaccgctctggatcaaggttatgccaggttttttacggccttggcacaggctgtgctgaaggccttgtagctgaccacgatcagccttttgtgtgccgagacaacctggagaacaacaagatgtccactcacctgtccaccgatcaactgctgcatgcctataccgtgatgcgcaccatccgtgatttcgaagaacgcctgcacgtggaattcgccaccggcgagatccccggtttcgtgcacctctacgccggtcaggaagccagtgccgccggagtcatggcccacctcaacgatgaagactgcatcgcctccaaccaccgtggccacggccattgcatcgccaagggcgtggatgtgttcggcatgatggccgagatctacggcaagaaaaccggtgtgtgtggcggtaaaggcggctccatgcacatcgccgaccaggagaagggcatgctcggcgccaacggtattgtcggcgcgggtgcgccgttggccgccggtgcggcgctggcggccagactcaagggtagccagggcgtggccgtggcgttctttggcgatggcggctccaacgagggcgcggtgttcgaggcgatgaacctggcctcgatcatgaaactgccgtgcctgttcgtcgcggaaaacaacggctatgccgaggccaccgggtctggttggtcggtggcgtgcaaggacatcgccgagcgtgccgtggggtttggcatgccggggatgatcgtcgatggcaatgatttcttcgccgtgtacgcggcgcttggtgttgccgtggagcgtgcgcgcaagggcgacgggccaaccttggtcgaagtgaaattgagccgcttctacggccatttcgaaggcgatgcacaaacctatcgtggccccgatgaagtgaaaaacctgcgggaaaacgccgactgcctggcgctgttccgccagcgttgcagcgccgaaggctggctggacgcggcgcaattcgagcgcatcgatggcgaggtcgcacagcttattgacgacgccgtgcgccgcgccaagtccgaccccaagccccaggccgccgacctgctcagcgatgtctacgtcgcctaccactcataacaacaacattcgtggagagaactttatggctcgcaaaatcagctaccagcaggcaatcaacgaagccctggcccaggaaatgcgccgcgaccagagtgtgttcatcatcggccaggacgtgtccggcggcacgggttcccctggcgaacaggacgcctggggcggggtgctcggcgtgaccaagggcctgtatccggagtttcccgaccgcgtgctcgatgcgccgctgtccgaagtcggctacgtgggcatggccgtcggcgccgccacccgtggcatgcgcccggtgtgcgaattgatgttcgtcgacttcatcggctgctgcctcgaccagttgctcaaccaggccgccaagttccgctacatgttcggcggcaagaccaccacgccgctggtggtacgcgccatgtacggcgccgggctgcgggccgccgcccagcattcgcagatgctcacgtcgatgtggacccacatacccggcctcaaagtggtgtgcccggccacgccctatgacgccaagggcatgttgatccaggcgatccgcgacaacgacccggtgatcttcctcgaacacaagatgctctacagcctgcaaggcgaggtgcccgaagagctgtacaccgtgccctttggtgaagccaattttgtccgcgagggcaaggacgtgaccctggtgacgtacggacgcatgctgcacatcgccctggaagccgccaccagcctggcgcgccaaggcatcgattgcgaagtgctggatctgcgcaccaccagtccgttggacgtcgacagcatccttgaaagcgtggaaaagaccgggcgcctggtggtgatcgacgagtcaaacccacgctgctccattgccaccgatatcagtgcgctggtcgcccagcagggtttttctttcctgcgcgcgccaatcgaaatggtcaccgcgccgcacacgccggtgccgttctccgatgcgctggaagacctgtatatccccaacgccgcaaagatcgaagccgcggtgctgcgaatcgccaacaagaggagcgccgcatgatccataccttgaccatgcccaagtgggggctgtcgatgaccgaggggcgcatcgatatctggctcaagcaacccggcgaccgggtggagaagggcgaggaagtgctggacgtggagactgacaaactctccagcagtgtggaggcaccgttcagtggcgtgctgcgccgcgtgcttgcactgagtgacgagacccggccggtgggcgcgttgctgggaatcgtggtggaaggcgaggccagcgaagcagagatcgatgcggtgatcgaacgcttcaatgccggttttgtttccagcagtgccgaaaccgaagcgtcgggaccgagtgcgcagaaggtcgagatagacgggcgcctgttgcgctatctcgagctgggcgaggcggggacgccgttggtgctgattcacggattcggtggcgacctgaacaactggctgttcaaccaaccggcattggccgtcgagcgccgggtgatcgccctggacctgccggggcatggcgagtcgggcaagcaactgcgcagcggcgatgtcgaggaactgagccaggcggtgctggccttgcttgatcacctcaagttcgaccgcgtgcacctggccgggcattccatgggcggactggtcgcactgaccgtggctgaccaggcgcccgcgcgtgttgcctcattgaccctgatcgccagcgccggtctcggcccggatatcaacggtgattacttgcaggggtttaccgaagccaacaaccgcaatgcgctcaagccgcaattgacccaactgttcagcgacccggcgctggtgacgcggcagatgctggaggacatgctcaagttcaagcggttggaaggggtggcgcaggctttgaggcaactcaatgcccagttgttcgagggagggcgccaacgtctggatctgcgcaaggtggtggggcagcaaccgagtctggtgatctggggtagcgacgacgcaatcatccccgtcagtcatgccgaggggttggacgcccaagtgcagattctgccggggcaggggcatatggtgcagttggaggcggcggaacgggtcaaccaactgatggccgccttcctcaaatcccaaccttgaaatgcagcccaatgtgggagggggcaagccccctcccaccatttggattggatttcaaacggaacgcttcagggtctcgctcggcaactccttgaacaacgcccgatagctattggaaaaccgccccagatgccagaacgaccagttcatcgccacctcggccacggtggtcccggctgaactcagcagttcccgccgtgccccattcaatctgcgcaagcgcagccactgcgccgggctcatcccggtgtaggtcttgaacccttgctgcaactggcgcaatggcacgccggcaatctgcgccagttccagcaggttgacggtctcgtccggcgcgtccgccgcccattcgccgatgcgcgccatcagccggcgttcctcgctgcggcgctgcaaggaactgcggtccaggcacacgcaggcgttgtcgaggatgaacaggcaatcgtcgagcaattgctggataagcgcggcggggtcgctgatcgtggacaagcgtgtcagcgtgccactcagccaacgggcgaacaacgcgttctgctggccggtcagtggcgccatgaacaaaccttccagcttcgccacctccaacccatggcgctgcacgaactgcgggccgaacaccaccgccacttcacggtagttttccggggtgatccaggtgttacggctctcgccattgagcaggtacagcgcgttgtcgctgccgtcgaaacagaacgccagggagccggcaggcgcattgaagtgctgttcgacgcgggtgttcatgcactcttcgtacacctccacgccttgcaggtcgaggtagcggatgcgcccggcgaaatgccccggggacatctgctggtactgctgcacccagccgggtgtcgcactgcattgagcggccacatcaccggtggtgaaggcctgtacgcgcaaagcggttgcctgtgtcatggggagcctgggcgcactctattggtgcgttgtggtgcgtgcaaagtggatagatgccggcgggcggcggcctcaagatagacctcaatgcgccaggagtacaagccggcgcatgcacccaacccatgccgaggtccttatgaacgcccccttcgatcagctgtccgcctggctgaaagaacacaagattaccgaagtcgaatgcgtgatcagtgatttgactggcatcgcccgcggcaagattgcgcccaccaacaagttcttgcatgagcgaggcatgcgcctgccggaaagtgtgttgctgcaaacggtaaccggggactttgtcgacgacgagatctactacgacctgctcgacccggccgatatcgacatggtctgtcgcccggtgtcccacgccacttatgtggtgccgtgggccatcgagcccaccgcaatcgtgatccacgacaccttcgacaaacagggcaaccccatcgagctgtcaccgcgcaatgtgctgaaaaaagtcctgcagctctacaccgacaagggctggcagccgattgtcgcgccggaaatggagttctacctgacccagcgttgcgaagacccggacctgccgctgaaaaccccggtgggccgctccggccgcgccgagaccgggcggcagtcgttctccatcgacgccgccaacgagttcgacccgctgttcgaagacgtctacgactggtgcgaagcccagggcctggacctcgacacgctgatccacgaggacggcccggcgcagatggaaatcaacttccgccatggcgatgccctcgacctggccgaccagatcaccgtgttcaaacgcaccctgcgcgaggccgcgctcaagcacaacgtggccgcgaccttcatggccaagccggtggccgacgagccaggcagcgccatgcacctgcaccagagcgtggtggagatcgccaccggcaaaccggtgttcgtcgatgccgacggcaacaagagccagttgttcctgcaccatatcggcggcctgcagaagtacatccccaagctgctgccgatgttcgcgcccaatgtgaactcgttccgccgcttcctgccggacacctcagcgccggtcaacgtcgagtggggcgaagaaaaccgcaccgtcggcctgcgcgtgcccacctccagccccgacgccatgcgcgtggaaaaccgcctgcccggcgccgatgccaatccgtacctggcgattgcggctagtctgctgtgtggctacctgggcatggtcgagcagatcgaacccagcgcaccagtggaaggccgtgcctacgagcgtcgtaacctgcgcctgccgttcaccctcgaagatgcgctggcacgcatggaggactgcgacacggtcaagcagtacctgggcgacaagttcgtgcgcggctacgtcgcggtcaagcgcgccgagcacgagaatttcaagcgggtgatcagttcctgggagcgtgagttcctgctgttgagcgtctaaaaaaccaataaaggggtgtcgatatgcgtcttgtgaaacagcttttcccgctggccctggtggccgcgttcagcagcgccagccaagcggcgccgacagtcagtatctacaactggaccgactatatcggcgagaccaccctggccgacttccaggccaagactgggatcaagccgatctacgacgtgttcgactccaacgagaccctggaaggcaagttgctcgccggccgcaccggctatgacgtggtggtgccgtccaaccacttcctggcgcggcaagtgaaggccggtgcgttcctcaagctcgaccgcgcgcagttgcccaacttcaagaacctcgaccccaagctgctcgcgctgctggagaaaaacgacccgggtaacgcgcattcggtgccgtacctgtggggcaccaatggcatcggctacaacgtcgacaaggtcaagcaggtgctgggcatcgaccatatcgactcatgggcggtgctgttcgaaccggagaacatcaagaagctcaaccagtgcggcgtggccttcctcgattcggcggacgagctgttcccggcgatcctgaattacctgggcaaggatccgcgcagcgagaaccctgaagactacaagcaggccgaagccaagctgttgacgctgcggccgtacatcacctacttccattcctccaagtacatctcggacctggccaacggtgatatctgcgtggctttcgggtattccggcgacgtgttccaggccgccaaccgcgccaaggaagccaagaacggcgttcacatcgcctattcgattcccaaggaaggctccaacctgtggttcgacctgctggcgattcccgccgacgcgagcaacccgaaagaagcccacgccttcatcaactacctgctcgacccgcaagtgatcgccaaggtcagcgcctcggtgggttatgccaacgccaatccggcggccaaggcgttcatggaccctgagttggtgaacaaccccgaggtatacccgccgcaggcggtgctcgacaaactctatatttccaccacgccgaccccggcgaccatgcgcctgatgacccgcgcctggagcaaagtgaagaccaacaaatgatgcagtcgactgaccacgcccggtcctactaccgggccacggccaacgccctgacggagcgccccgcattgggcgccgacttgagcgccgatgtgtgcgtgatcggcggcgggttcactggcgtaaataccgccatcgaactggcccagcgcgggctctcggtgatcctgctggaagcccggcgcatcggctggggcgccagcgggcgcaacggcgggcagttgattcgcggtatcggccatgacgtgtcgggatttgccaaatacgtgggcgaggagggcgtgcgttacctggagcgcgccggtatcgagtcggtggccttggtgggcgagcgcattcgcgagcatgggattgactgcgacctgcgctggggcttttgtgaattggcgaacacgcccgcgcaattcgccgcgttcaagggcgagcaggcgcacctggcggagctggggtatgcccatgaaacccgcctggtcggcgtgcaagatatgcagcaagtggtcggatcgacggtgtatgccggcggcctggtggacatgggttccgggcaccttcacccgttgaatctggtgctgggtgaagcgcagttggctgagtctcttggagtgcggatcttcgagcacactgaggtgcttgaactgatccacggcgacacggtgcaagtgcgctgctcaggcggcacggtacgcgccgaccacctggtgctggcctgcaatgcccatctggaggaactggaaccgcgcctgagcggcaaggtgctcccggcgggcagctacatcatcgccaccgagccgttgtcggaagatgtggccaaccagttgatcccgcagaacctggcgctgtgcgaccagaaagtcggcctggattactaccgattgtccgctgaccgccgcctgttattcggcggcgcctgtcattactccggccgcgatccggtggacatcgccgcttatatgcagccgaaaatgctcaaggtgttcccgcaactggcccagaccaccattgagtttcagtggggcggcaagatcggtattaccgccaaccgctttccgcaggtggggcggttgaagcagtaccctaatgtgttttatgcccagggctattccgggcatgggttgaacgtgacgcactggtgtgcaaggttgttggccgaggggattcacgccggtcacagtgccggcctggatattttcagccaggtgccgcatatgaccttcccgggggggaaggcattgcggtcaccgctgttggcgttggggatgatgtggtttcggttgagggagatcgtgcagtgaagcgttgcaataaggactgaatagctacattcgaacgcgatttgttatgtccccgaaaggagggcgagtgtaggcaaacctcttattaaccacgcaggtcactatagatctttcgttggcgatgttctttgggttttcacatatccataggcttttgacgggcccctgcgtgttggcgagactcgtgagtggggttgcaagagctgttgtgaatatgggcaggcccaacacaatgctcaatataggtaaggtccaagtattgtgtttcattgaggtgtttcccgaaggcagtttcggagaatggtttcctttttcaaggcaacatagcccctaccgcatcgaagttaacggccgcatcggtcgaggatcccactgcgtacgcgcctgcgggtgaaatgctattcaggttgctgctcccccctggcgtaaggggcgatatggcgaccgtgcccgccgagggggtccaatagcacgccgtggataattggttggcgttaacacaattcaaggcaacggtatcgttgttggaaaaaccaactgcttggatcagattgttgccgggcagcggattgaccggttgcacggtgaaagagtttgcagggtcttgccagtaaaaaggtatatcaagtcccgtaggttctttgccgtacgccaatacatgcccaagatcattgatcgccacggcgtggttcagtgcattcagaggcaacgtcaggagcaaaggtgtttggtcataaaactcccagaaggcggtttgccgtgtgtcggcggccgacccgggaaacgtgcaggtgcctgcaatcctgccctgattgttcatgtctacggcaaagcagtaaatggctcccgtcggtagcttcgcgggttctaacgtatagccgctaccgttccacctggcgaccttgatgacgggagggccgtctggtccagggcaattcaacaggataagcgggcgcccgccgaacagggtttcggtcaagtcaacgccagtacagttgtcgccccagcccgacacccgctctggcgtggagttacccgcggtgtagatcaccaccgtcggaactccgcttgcgctcaggcttcgcgccacaaccaccccgttctgattttgtgcggttggcgtcgtttgtttgtcagccgggcgcaacagcgggaacagcaaggtgcctggcagcggattcataggtgttggtgtaacggctggggttgcggggttccaaaaaacgccgaacaggacgccaaggctgttggcgcagacccccactatcgaattattgctggtgttggcgatagccgatacttggcaaggctgacctgcggccagcggcgccagcttttgctgggggcctgccagtgttgccgagtaccatggaccgatgttggcactgggtgttgtcgaactgcagtcgcccactatttgcccgctgtcgttgcccccaatcgtctcgcattgcactccggcagcatggcccgaactgacgaatgtcgccgcactggcactcaatccatacccgcaaagcaacacacccacactcaacaccatcggtgcaatcagttgtctcaacaaacgttgcataatccgtccttccctggctgacagaatgacccactgggggtgaacccccacggtccctgaatgccagtaaacgccaggttcgatggacgcacaactgtcacttctgacaggtacaggaggagttgccttaagcctcggtcagcactttcctgaacgtttccaccaacggccgcaaattgacccgatgccacgccacccacagtggcgtggtgtacgtcagccacggtaattcgcgcaagatcacgccgggcggtgcattgcggctcaggcctttttgcaccatcgccacacccaaccctgaagccaccaaccccagcgcggtaaacggctcgctcgcttccatggggatctgcggggtgaagccggcgcggatgcaggcggcgacgaagtcatcggcggggttggcgccgggtttgcgctgcacgccgatccactcctggtcggccaggtgttcgggcaacatttcactcaggcgtgccaagggatggtgctcgggcaacgccagcagcatcggttcgtccagcacctgcaaggcggtcaggtccggatcatcggcggccggcggttcgccgaccagggcgatatccaggctgcgttggcgcaggccttcgagttgttcgagggacggcaggttatacagcttgatgtgcacgttcggccggtcgtcgcgcagtacccgcagcgcgttgggcagcacaccggcatgcatggcgttttcgatatagccgatgcacaggccaccttcttcaccgcggcccaggcgcttgcccagtgattccaggcggttggcgtgggtcagcagcgccttggtttctgccaggaacgtctggccgtcacgggtcaggcggatgcgttgctggctgcgttcgaacagggtcaggcccaggcgttcttcgagctgggcgatctgccggctcagcggcgactgggagatgtgcaggcgttcggcggcgcggccgacgtgttcttcttcggcgaccacttcgaagtagcgcaattggcgtagatcgatcatgtaagacctatggggactcaagttggtcgcagtatgtcttggacggtccgacctctgcaatctagcatctgttccacggtcacagcgaccctttgtactgttgagaatccatcatgaacttgaaagacaaactgcccggcgtccagggcttcggcaccgcccgtcctgccgctttaacttcaggagttcaaccatgaaaatcgatgtaagcggcaaagtagcgattgtcagcggcagcactgccgggatcggcctgggcatcagccaagcacttgcagcctccggcgccaccgtggtggtgatcgggcgtgaagccggcaaggtcgacgatgcactggcgagtatccgtcaggctgtcccaggcgcagacctgcgtgggctggtggctgaccttggcaccgcagagggcgcagagaaactcttcgccgccgaaccgcgtgccgacatcctggtcaacaatctgggcatcttcaacgatgtggattttttcgatgccccggacagcgaatggacgcgcttctatgaggtcaatgtgatctccggtgtacgcctggcgcggcattatgtgccgggcatggtcgggcagggctggggacgggtgatcttcgtgtcgtcggaatccggcgtggccaccccggcggacatgatcaattacggtgtgaccaaaagcgccaatttggcggtgtcccatggcctggccaagcgcctggcgggcacgggagtgacggtgaacgccgtgctgcccggcccgacctttaccgacggcctggagcagatgctcagggacgccacacaaaaatccgggcgcagcgcgcgggatgaggcggacgtgtttgtgcgcaatgcgcggccgacatcaatcatccagcgcgcggcaaatgtggatgaagtcgccaacctggtggcgtacattgcttcaccgctttcttctgcgacaaccggtgccgcattgcgcgtcgacggtggtgttgtcgacagcatggcgatctgaattgtttttcattttctggagtatttatcgtggcaacagcctcttctgtgattgaaatcccggtgtcggccgatcaggtctggcaattggtcggcggcttcaacagcctgccggactggttgccgttgattgtcaaaagcgagccaagcgatggtggccgtgtgcgtcacctgcaaacggcggacggcgcagtgatcgtcgagcgtttgcagagctttgataacgtcggacgtacctacagctacaccatcgagcagtcgccgtttccggtgagtgcgtatctggcgacgttgcaggttgaggcgctgacggacgcttcggcgaaagtgacctggtccggtgtgtttacaccagtggcggggactacggatgcggcggttgaggagctgtttgccggtgtctacagcggtggtcttgaggccctacgcgccaacttcccggcctgatccagtccaatgtgggagggggcaagccccctctcacattgggacgcccatgttctcaggcctcgggcatcagttgctggcggcactccagaaccaatctggcaccgccttgctcactcgtacccacgtccaacttgaagccatgcaagttgatgatcgccgccacaatcgacaagcccaatccaaacccaccttgctggtcgctttcatccacgcgatagaaacgctggaacaccgcatcccgctctgccgccggtatgcctggcccggagtcgtgcacttcaatgcgcgtgctgcccgcatcgttgaccccgcgcagaatcaccgcgccgcccgggggggagaacttgatcgagttgctcagcaggttggccagggcttcgaacaacagggcgcggtcgccggtgatccatggcagggactccggggtttcgagcttcagttgcagttcaccttcttcggccagtggcaggtagaagtcgtgcaactcgcgcagtagcggcagcgggtccatgaccaggaaaccggagcggcgctgatggtcctccagctcggagatgcgtaacagcccgcgaaagcgcgccatcagggtgtcggtctcggcaattgcatcgtcgagtttcaccgcgtagtcggactcggcctccgcctcctgcttgatgcgatacagctgcgcacgcaggcgcgtcagcggggtgcgcaggtcgtgggcgatgttgtcgcacacgcccttgacctcgttcatcagcttctcgatgcggtcgagcatggcgttgacgatggccgcgagcatgtccagttcgtcacgccggttggacagcggcaggcggtgggtgaggtcgccggcgacgatggcttcggcgctggcctggatcccacggatacgccgcaacgggcggcggcgcagcaagtgccagccggccgcgccgggaataatcgtcagggacaatgcccagagcagggcatgccagatgatccgggtcacgccgaacagcgaaccgttggcccgcaccagcaccagccaacggccgtcttcggtgtgagtggctacggcgtcgcagctgtctttgggcaatttggggtcgtcggactcgacgcaattggccagggcgtggatcttgccgtccagcggcaggtccggcgggatcgcacgaatcggcccgctcaaggggcggaattgttcatcgaacaggccgtaggcatccacgcccttcatgtcgaaggtcatgctggtggtcagggcctccaccagttcctcgccgtcgaagcgctggaacaggtgctggcgctgcatcagggagtggcgcgacaggtcgcccaggtaaccggacacctcgtaatacagcacccccatgaggatgcagctccaggccacgaacagcgagctgtacagcgccagcaggcgactgctggaggagcgccagcctttagaggggttcagcaatgacataaccggagcctcgtaccgtgcggatcagcggcgtgaggcccggtgggtcgatctttttgcgcagacggccgatgtgcacgtcgatcaggttggtgccggggtcgaagtgatagccccagacttcctcgaagatcatcatccgcgacaggatctgcccggtgttgcgcatcaggaactccagcagtttgtattcggtgggcagcaggctcaggggttgatcggcgcggctggcttcgcggctgatcaggtttagctccaggtcggccacacgcagggcggtttcgaattccttgaccgtacttttgcgtcgcagcaacacctcgacgcgggcggccatttcatccgaggcgaacggcttggtgaggtagtcatcaccgccggcacgcaggccacgcacgcgttcgtcaacgtcggagagggcgctgatcatcaggatcggcgtggaaacgccgatggtgcgcagggtcgtcacgatggccaggccatcgagttccggcagcatgcggtcgagggtgatcaggtcgtaatcgccgctcacggcgcggaccaggccttcgcggccgttgtctacccaatctacatccagtccatggctactcagctcggcgacaatctcgcgggccgttacggcgtcatcctcgatggtcaaaatacgggtcataggattacctggtgagcgattcacactagaagtgggggcattttgccaagaaacggctgaatgcttcctaaataaaacttcatgttggcaaaactgacacagatttcatcgcctgccggggaatgcataacgcccgcttcaaacggccatttcttgcaagttgcatggatcaggttagttcaatttacttaattcattgaaatctaaggattttattttttgtccaggctggcatggtgcctgcactgtcccttttgagacctgtaacactatttttctgccttggagcaaaacaacaatgatcacatcctcatccacgctgcaagagtcgagcgcgctctccggggtttcctggggggcgatttttgccggggccgccgccgcggctgcgctgtcgctgatcctggtgctgctgggcttcggcctgggcttttcggcagtgtcgccgtgggccgatagcggtatcagtgccaagggcttgggtatttccacgattgtttggctggcctttacccagatcgttgcatccggcctgggcggttatatcgccggccggttgcgcgtgaagtgggccaatatgcatggcgatgaggtgtactttcgcgacaccgcccatggcttcctggcctgggccgttgccacgctggtcactgcggtattggtggtcggttcggtcagcagtgtggtcagcggtggcgtgaaagccggtgccagcgttgcagccggtgccgccagcggtatcacccaagccgccggcagtgccgccaaaggtgccaacagcggcgatttcgattactacgttgacagcctgttccgtgatgatcgcccggtcgccgtcagcgatgacgccgcccatggcgtggtggcccgcatcttcacccgcaccctgagcaacgacggccagcttgcacctgaagaccgtgcctacctggcccagttgatcagccagcgcaccaacctcagccaggcggatgccgaagcgcgcatcgacaaagtctacggtgacgcccgtaaagcggtggaagacgccaagctcaaagccaagcaagctgcggaaaccgccgcaaaagtggctgcgtatacctcgctgtggaccttcgtcgccctgttgatcggtgcgttcttcgccagcctcgccgccacctttggcggtcgccgccgcgatgccgtggtgtatgtcgaaaccgaacacttcgttcgttaatcaattcaaggagaacaacatgcgctcattactgctctggttcctcggtgtgcctatcccggtgatcatcctgattgcgatcttcatgcactgatcctcgctcaggtttctcaaggccgcgtctgtttccacaggcgcggctttttttgtcttacgggtacgaaggcttatacctgtcaagtttgacagtatcgccgggctctgaaagtgcctagtttgtttaagtcccaactcactgagagcacggtcatgaatcaaactaccggcacattgacggcaactgtcgtcaacccacaagtcattccaccgaaccaaccgtttattggcgatcccggtgaaatgctgatgtaccgatcaggtggatatatacacattgcggcaacgcaaaggttgggacccacggtcaatgatttcaacggtttcaattttcgtataccgaacatcattgcgggcagtgggtcgcacaccttcgtgcttggcgttactgctcggggtatctattgggctcatgagcttggtggtgtcacgccgtacacggctgtaaatggcagtctcactgtttcattggaccagaaggacacgttgacggggacgttcaacttcccgggagaaaacggcagccaacacatcagtgtcagtcagggccagatcgacctggcgggctttattacccagccagtaccggtacggctgccaacggttacaggtacaggctatatgcgaggagacgtcgtaggagggcctttgccaaaccagaactttgacgcggcagttgtcagcctcagggaagtcgatggcggcggcatcagcaagaactactttgaattcattggcaggcagtacaacgagttaggaattcagaactatgttgccatcttgctggacgttgaccagacggcgcttacctacgtgttagggagtaaccgtgaagcccgagctcttttcgcggtgatggactcctttgggtttgcgtatgccatcagcgggtcgttgaacttcacctctctgcctgccagcggtcgcgcagccggcagcctcgactgcatggtgcagaagaatcaggagccacccttccatgtcaatgttgtgttcgatatcacagcttaggttcagccagcggacctgatggggtaacggccaacgtctcacgcaattgttaatagcggcttaacccgtgcttggctagactcgcgccccatgagccgccttctgcgtttagtcctggtcctgctgctgagcctcacgcttcccctgacagggatggcgggtgtgccgtcgagcaccgagccctgcccgatgaaaatgtcgggcatgccgatgatgagcgacatgtcgcccgactgctgtcaggacggtgctgaacatggcaaagcctgcaagcccggccaggaatgcaagaccggtagcctgctgcaactgtccctggcggtgctcaaggcgccgttgccctcggcctatccgctgcgcgtcagcgcctcttcggaattcatccctgaccgcacgccatccggcgtctggcgcccaccccgttcctgacccctgttgcacctcaagacgcatcccctgaccgggatggttttgctgtgggccgcctgacgcggtgcacagcgcaacggaacaggaattttcaacatgaatgcctcctacatgcgcgccctggtggtgggcgtgctggcgtggccggcgttggcgagtgcgctgaccctggatgacgccctgcgcctggcgcaaaacaatgcaccgtcgctgcaggccgagtcggccaagttgcaggccgccacccaggcggcgatcccggcgggcgaattgcctgaccccaagctggtggtcggcctgcagaactttcccattggcgggcccaatcgcggcacgttgtatggcgacgagatgacgcaacagatgatcggcatccagcaacaggtgcccagccgcgacaagcgcaaggcccgggtcgagctggccgatgcaaccatcgaacgggcagctgccgaggggcgcatcgagcgcctgaacgtgcgccaggccacggcccaggcatggattcgggcgtatgcggtcgcgcgcaagcaagccttgttcaaggacttctaccaacagaaccgtctgctgcaagacaccgtgcgtgcgcagttggccggcggccgtggccaggccgccgacgcggtcatcccccggcaggaagccgccgagctggccgggcgcgacgatgagttgacccagcaacgtgcccaggcccgtgccgcgctcaagcgttggatcggcgcggccgctaacgaagctcccagcggtcaactgcccaactggaccttcgacccccacagcctgaaccacaacctgcaccagcacccggcactgcaagcctacgtgccgcgcacccgcgaagcgcaggcgcgcttgcaggatgcgaaggcgcaaaagacttcggactggagttgggaggtcgattacgggcaccgcagccgtgagttcggtgacatggtcaacgtgcagttcacctttgacctgccgatctttcccggccgtcgacagaaccccggcatcgccgccaaacaggccgaactggaccagcttgacgccgagcgcgcagccgcgacccgtgagcatacccagatgctcgatgacgacctggccgactaccagcgcctggaccgcgcggtacagcgcagccaggacagcctggtgccgctggccgaggaaaaagtcagcctgagcctggccggttaccgcgccggcaaaggcgacttgatgacggtggtcaacgcccgccgtgagctggtcgaagcccgtttcaagcagatcgatgccatcgaacaacgcgccctggtcggcgcgcagttgtatttcgcctatggggaacccgccaatgaataatcgaatcgtggccgctgtgttgctgctgggtctgggggccggctatgggctggcgcagtggcagcccggggcacccgcaatgcccgtaaaatccgacaagcaggcgctgtactggtatgacccgatgttcccgcaacagcagttcgataagcccggcaagtcgccgttcatggacatgcaactggtgccgcgctacgccgatggggcggtatcgacggctacgccggcggtgcagatcgatccgggcctggcgcagaacatcggcgtgcgcctggcgagtgtgagccgcggcgtgctgacctcccgcctggacctgtcgggcatcctggccttcaacgagcgtgatgtggcggtggtgcaggcgcgggcggcggggtttgtcgagcgggtctacgcacgggcaccgggggatgtgctcaaggccggtgcgccgttggtggacctgctgatacccgagtgggcggccgcccaggaagagttcctggccctgcggcgcagcggcgagcccggcttgatcgacgctgcccgccaacgcctgcgcctgagcgggatgccggcggggttgattgcgcagatggaacgcagcggccaggtgcagtcggtcttgaccgtgaccagcccgatcagcggcgcgctgcaaaccctcgacgtgcgcgaaggcatgaccgtggcgccggggcagaccctggcgcggttcaacggcctgggctcggtgtggttgcaggtcgccgtgcccgaagcccggggggccacgttgaaagtggggcaaaccgtgcagagccgcttcgtcggtttgccgggcgagacgctcgacggcacggtcagcgcgatcttgccggccaccgccacggacagccgcaccgtgcaagtgcgggtcgagctgcccaaccccgaaggcgccctgcgcccgggcatgaccgcccaggtcagcctggcgcagaccagcgggcaagcgttgttgcaggtgcccagcgaagcattgatccgcaccggcaaacgcgtgctggtgatgctggccgaggagggtgggcgctatcgtccggtcgaggtcgaaaccggcgcggagaaccaggatcgtacggtgatcctcagtggcttgcaggaaggtcagcaggtggtcgcgtccgggcagttcctgctcgactccgaggccagtctcaagggcattaccgccaccgctgcggaagctgcgatgaacatgcagccgggagcccagccatgatcgcgctactgattcgctggtcggtggccaatcgtttcctggtgctgctcgccaccttgttcgtcaccgcgtggggtgtctggtcggtgcagaacacacccgtcgacgctttgccagatctatcggatgtgcaggtaatcatccgcaccccgtacccgggccaggcgccgcagattgtcgagaaccaggtcacgtacccgatgaccactaccatgctctcggtgccgggggccaagaccgtgcgcggtttttcgttcttcggcgacagctacgtgtacgtgttgttcgacgaaggcaccgacctgtactgggcgcgctcgcgggtgctggaatacctcagccagttgcaggcgcggctgccggcatcggccaaaccgtcattggggccggacgccaccggcgtgggctggatctaccagtacgccttggtggaccgcaccggccagcacgacctggcgcaattgcgcgcgttgcaggactggttcctcaagttcgaactcaagaccctgccgaatgtggcggaagtcgccaccatcggtggccaggtcaagcaataccaggtgcagctcgacccgctggccctggccagtcgcggcatcacccaggcgcaggtgaaagcagcgattgaccaggccaaccaggaagccggcggctcggtattgaacctgggcgagtccgagtatgtggtgcgtgcctccggctacctgaagaatctctctgacttccgcgccatcccgctgcgcctcgacgccaacaatgtaccgctcaccctcggcgatgtggcgaacatccagctcggcccggacctgcgccggggcatcagtgagctggacggcgagggcgaagcggtcggcggcgtggtgatcctgcgcagcggcaagaatgcgcgggaagccatcgcggcggtcaagaccaaactggaacagttgaaaagcagcctgccgcccggtgtggaaatcgtcaccacctacgaccgcagcaagctgatcgaccgtgccgtggacaacctcagccataaactgctggaagagttcctggtggtggccctggtgtgcgggattttcctgtggcacctgcgctcgtccctggtagcgatcatctcgttgccggtgggggtgttgatcgcgtttatcgtcatgcgcttgcagggcatcaacgccaacatcatgtccctgggcggtattgcgattgccatcggcgcgatggttgatgcggcggtggtgatgatcgaaaacgcccacaagaaaatcgaagcctggcaccacgccaaccctggccgggaactcaagggcgatgcacattggaaggtgatgacggacgcggcggtcgaggtcggcccggcactgtttttctgcctgctgatcattacgctgtcgtttattccggtgttcaccttgcaggcccaggagggccggctgttcgggccgctggcctacaccaagacctacgccatggcggccgccgccgggttgtcggtgaccttgatcccggtgctgatgggctactggattcgcgggcgcatacccgacgagcaacgcaacccgctcaatcgcggcctgatcaagctctatcagccggcgctggaggcggtgctgcgctggccgcgcatgaccctgctggtggcgctgctgatggtggcgagcgcgctgtggccgatctcgaaactgggcggtgaatttctgccgccgctggatgagggcgacttgttgtacatgccttcggcgctgccgggtttgtcgacacagacagcgggtgaactgctgcaacgcaccgaccggctgatcaagacggtgcccgaagtcgcccatgtgttcggcaaggccggccgcgccgaaaccgccaccgacccggcgccgctggagatgttcgagaccactatcgagttcaagcccaaggaccaatggcgtcccggcatgaccccggacaaactggtcaaggaactggaccgcgtggtgcaggtgccgggcctgaccaatatctggatcccaccgatccgcaaccgtatcgacatgttggcgaccggggtcaagagcccgattggcgtgaaggtcgcgggcaccagcctgatgcagatcgatgcggtgacccaggccgtggagaaggtcgccaagactgtgccgggcgtgagttcggcgttggccgagcgcttgaccggcgggcgctacatcgacgtcgacatcgaccgtgccgccgctgcgcaatacgggctgaacatcagcgatgttcagtccatcgtgtcgggtgcggtgggcggtgaaaccattggcgaaaccgtggaaggcctggcgcgtttccccatcagcctgcgttacccgaaggaatggcgcgactcggtggaagcgctgcgcaacctgccggtgtacacgccacagggcagccagatcaccctgggcacggtggccaggatcaaggtcaacgatggcccgccgatgctcaagagtgaaaacgcgcggccttccggttgggtgtatatcgacgtgcgtgatcgtgacctggcttcggtggttcgggacctgcgtgcggcgatcaaccagcaggtaaagctgcaaccgggcatgagcctcagctattcggggcagttcgagttcctcgaacgcgccaatcagcgtctgaaactggtggtgccggccaccttgctgatcatctttgtgctgctgtacctgacctttcggcgggtgggggaggcgctgctgatccttgcgaccttgccgttcgcgttgaccggcggcgtgtggctgctttactggctgggcttcaacctgtcggtggccacgggcgtgggctttatcgcgctggcgggggtgtcggcggagttcggcgtgatcatgtggctgtacctgaagaacgcctgggccgagcgcaaggatggcaatctattggcggccatcaccgaaggtgcggtgctgcgggtacggcccaaggcgatgacggtggcggtgatcattgccgggttactgccgattttgctgggcagcggcaccggcagtgaggtgatgagccggattgctgcaccgatgattggcgggatgctgacggcgccgttgctatcgctgttcgtcattcccgcagcctactacctgatgcgccgccgataaacatgtgggagggggcttgcccccgatagcggcggatcagacacaaatccagtgactgacacacagctatcgggagcaagctccctcccacaagggatctccaacgccggcaggttcagtcgtcgaacccgacctgctcgtgaatctcatccaccttcaactccaaccggtacgccaccgcgataaacaacgcctggcacaggcacaaggtggcgctcaacgagcggaaggcaaacgacgagccttcattcaccaacagcactgcgttagcccgcttggccaggggcgacaggttgctgtcggtgatgatcagcgtcttggcctggtggtgctgggcgatgcgcaggcagtgctgggtctctttaccgtagggcgtgaagctgatggcgatcaccaggtcattggcgcgcacgctgcgcatctgctcgcggtagctgccgcccaggcccgagatcaggtggatgcgcttgttggtgtgctgcaggttgtagaccaggtagtcggccaccgcaaaggaacggcgcacgccgaccacgtagatattgtcggcgttgaccaccaggtccacggctttgtcgaaggcgacatcatccagctccaggcccaggcgctcgatgcccgacagcgtggcgttgacgcattcgcgcgccaggtcgccgccgctggctttctgcgacttgttggcgatcatgctgcggatgcgctgctggtagttctgcaccggcgtggtcttgtgggtgtaggcctcgcggaacagcgcctgcatctcactgaacccactgaacccgaaacgctgtgagaaacgcacgatggccgacgggtgcacttcgcattcgcgggcgatgtcgctgatgcggtcgaccatgatccggtcgctctgctggctcatgtagctggcgatgcgcttgagctggcgcggcaggctctcgtattcgtcggtgattagctgcaacaggcgctcggcattgatcggagggctggcgatagagtcttccagggtggtctcgggatcggtgcgggacatgggcaatccttctggcgttttcgtctgttgcgctgatgggtggcgcaagtctacagggtaggcgcaaaaaaataccccggcatcacggccggcgtggcctgctgaaacgatgcactgtggtgggagcgcccctgtacgagcttaatggaaaaaatattccaatgaaaaaatatctggaataaatattgattggcgccgccggacgttctagtctgctcccaccaagagcgtttgccgcccccacggcggcacaacgcaggctgataaaaataacaggagccagcatgggccagactcgttttgccagtgggcgtcaattggatctgatttgcctcgggcgcctgggcgtcgacctctatgcacagcaagtcggtgcgcggcttgaggacgtgtccagcttcgccaagtacctcggcgggtcctccgccaatatcgccttcggcaccgccaggctcgggctcaagtcggcgatgctgagccgggtcggcgacgaccacatgggccgtttcctggtggaatccctggcccgcgagggctgcgatgtcagcggcatcaaggtcgacccggaacgcctcaccgccctggtgctgctcggcctcaaggaccgcgaaaccttccccctggtgttctaccgcgaaaactgcgccgacatggccctgcgcgccgaggacatcaacgaagcctttatcgcgtccagcaaagccctgctgatcaccggcacgcatttctccaccgacggcgtgtacaaggccagcatccaggccctggattacgcggccaggcacaacgtcaagcgcgtgctggatatcgactatcgcccggtgctgtggggcctggcgggcaaggccgatggcgaaacccgttttgtcgccgaccagaatgtcagccagcacgtgcagaagatcctgccgcgcttcgacctgatcgtcggcaccgaagaagaattcctcatcgcgggcggcagtgaagacttgctcgctgccttgcgcaaggtgcgtgaactgaccccggcgaccctggtggtcaagctcggtccgcaaggctgcacggtgatccacggcgccatccccgcacgcttggaagacggcgccatctaccccggcgtgcgcgttgaagtccttaacgtgctgggggccggcgatgcgttcatgtcgggcttcctcagcggctggctcaacgatgccagtgatgagcgttgcagccagttggccaatgcctgcggtggcctggtggtctcgcgccacgcctgcgcaccggccatgccgacgccggcggagctggaatacctgttcaacagcccggtgccgatcacccgtccggaccaggacgtgaccctgcaacgcctgcaccgcgtgacggtgccgcgcaaaagctggaagcagctgttcgtgtttgccttcgaccatcgctggcaactggtggacctggcgcagaagggcggccaggacctggcgcgcatcagcgaggccaagcaactgtttatccaggccatcgaacgcgtcgagcaaaagctcgccgaacaaggcgtggaagccgatgtcggcctgctcgccgaccagcgcttcggccaggacgcactcaacgccgccagcggccgtggctggtgggtcgcgcgcccggtggaagtgcagaactcgcggccgctggtgttcgagcatggccgttcggtgggcagcaacctgatcgcctggccccaggaacagatcatcaagtgcctggtgcaattccacccggacgacgaaccgctgctgcgcctggaacaggaagcgcaattgaaagcggtgtacgaggcgtcgattgtcagcgggcatgaactgctgctggaagtcatcccgcccaaggaccacccgtccacgtatcccgacgtgctctatcgcagcctcaagcgcctgtacaacctgggcatctacccggcgtggtggaagattgaagcgcagtcagccgaggactggcagaagctcgacgccctgatccaggagcgcgatctgtactgccgaggcgtggtgctgctgggcctgaatgcctcggccgaatgcctcgccgatggcttccagcaggcccgcctgagcactacgtgccggggttttgcggtgggccgcacgatcttccaggaaccgagccgggcgtggatggccggcgagatcgacgatgaaaccctgatccaacgggtgcaagccacctttgaacagttgatcaacgcctggcgcagctcccgaggctaaacccaattcctgatttgaaatgcaatccaatgtgggagggggcttgcccccgattgcggttgttcagtgacagcagtggtgtctgacactcagctatcgggggcaagccccctcccacatacagcaaaaagcagatctcagtgatacctgaaaataataaaggtgcagccatgcccgcaatccgaattggcatcaacccgatctcctggagcaacgacgacctgccggccctgggcggtgaaacgcccctgagcaccgccctgagcgaaggcaaggaaatcggctacgaaggcttcgaactcaacggcaaattccccaaggacgccaagggcgtcggcgacgtattgcgcccgtacgacctggcgctggtctctggctggtattccagccgcctggcccgacgctcggtggcggaagaaatcgcggccatcgccggccatgtcgagttgctcaaacagaacggcgccaccgtactggtctatggcgaggtggccgattcgatccagggctcgcgcatccgcctgatcgaacgcccacgtttccacagcgaacaggcctggcaggactacgccgacaagctcaccgaactggcgcgcttcaccctgtcccagggcgtgcgcctggcgtatcaccaccacatgggcgcctatgtcgagtccccggaagacatcgaccagttgatgcagcgcaccggccccgaagtcggcctgctgttcgattcgggccattgctacatgggcggcggcgagcccatagaggtactgcgcaagcacatcgaccgcgtctgccatgtgcatttcaaggacgtgcgcaaaccggtggtgcaactggcgcgcaaccagatgtggagttttcccgactgcattgtcaacggcactttcaccgtgcccggcgatggcgatatcgacttcgccgaactgctcgatgtgctgctggccgcccactatgaaggttggctggtggtggaagccgagcaggacccggccgtggcgcccagctatctctatgcgaaaaaaggctacgacaccctgcgtgcgcttctgaatgagaggaccggacaatgagcctgttggtcaaaagcagcaaacgcggccagaccatggtcgccctggaacccgggcgcctggagtacgtggggttcgccgcctaccgcctgagcctgggcgaaaccctgccggtcagcgccggtgaccaggaactgtgcctggtgttgctcagcggccgcgtgaacatcgagggcgagggcttcaactggcagaacctgggcgatcgccagtcggtgtttgaagacaaatcaccgttcgccgcctacctgccgccgggcaccgatgcccaggtcaccgccctgagtgatgtgcagattgcggtctgcgccgcgcccggcgccgaaggctacgaaccgcggctgatccgcccggaaacctgcaagcgcagcgtgcgcggcaaaggtgccaacacccgctacgtgtgcgacatcctgcccgacagcgagccagcccattcgctgctggtggtggaggtgcgcacgccgtccgggcattcatcgagctacccgccgcacaaacacgacaccgatgacttgccgcgccagagcttcctcgaagagacctactaccaccagatcaatccgccccagggctttgtgttccagcgcgtctataccgacgaccgcagcatcgaccaggccatggccgtggaaaacagcgacctggtcgtcgtgcccaagggctatcacccggtcagcgtgccctatggctacgagtcctattacctgaacgtgatggccggccccaagcgcgcctggcatttccacaacgacccgcagcacagctggctgctggacctctaatcagcggttccggacggagaataacaacaatgaagtcgcctctacgtttcgcccttaaccgcatcgtcgcgcccaacctgtccctgccggatttcatccagctggcggcggcgctcaagtgcgatgccatcgagttgcgcaatgacctggcggacaagcagatcgagttcggcaccccggccagccgcgtgcgcgagttgtgcgcggtgcagggcatcacggtgctgtcgatcaacgcgctgtacccctttgacgtgtggaacgacgagcgtcgtgcccaggcaatcaagctggcgacctacgcccgcgagtgcggcgcccagggcctggtgatgtgcccgctcaacgagccgggcgacacgcgcaacgaggcccagcgtgcggccggcttgcgcacggccttgagcgagctggcgccgatcctgcgcgagtacggcatcctcgggtttatcgaacccctgggctttgaagagtgtgcgctgcggcgcaagcgtgtggcggtggacgcgatcaagtccatcggcggcctggatgtgttccgcctggtgcacgacaccttccatcatcacctggccagcgagcatgagttcttcccggagttgaccggactggtgcatatctccggcgtcgaagataccgaggcgccgctgagttcgattcgcgacggccaccgtgttctggttggcgagggcgacatcctcggcaacgcggcgcagatcgacaccttgctcagcaccggctacagcggctacctgtcgttcgagccgtttgccgagagcgtgcacgggctggcggatatccagcaggccttgggcgcaagcatcgcccacctgcagaaacgataaggggcgcgacatgaccacaacccgactgaccatggcccaggccctggtgaagttcctggacaaccaatacatcgaagtcgatggcgtgcagagcaagttcgtcaccggggtgttcaccattttcggccacggcaacgtgctgggcctgggccaggccctggagcaggacagcggcgacctggtggtgcaccagggccgcaacgagcagggcatggcccatgcggcgatcgggttcgccaagcagcacctgcgccgcaagatctacgcgtgcaccgcctccgtaggcccgggggcggccaatatgctcaccgccgccgcgaccgccacggccaaccgtattccgttgctgttgttgcccggcgatgtctacgccagtcgccaacccgacccggtgttgcaacagatcgaacagttccacgacctgagcatcagcaccaacgatgcctttcgctccgtgagcaaatactgggaccgtatcaaccgccccgagcagttgatgagcgccgcgatccacgccatgcgcgtgctcaccgacccggctgaaaccggcgcggtgaccctggcattgccccaggacgtgcaggccgaggcctgggattatccggattacttcctgcaaaaacgtgtgcaccgtatcgaacggcgcccggccacccgcgcgatgatcggtgatgcagtggccgccttccggggcaagcgcaagccgctgatcatctgcggtggcggggtgaagtactcaggcgcgaatgccgcgctgcaagcctttgccgagcgctttgatattcctttcgccgaaacccaggcgggcaagagcgccgtggtctccagccatccgctgaacgtgggcggtattggcgaaaccggttgcctggcggccaacctgctggcgcccgaggccgacctgatcattggggtgggcacgcgttacaccgatttcaccacctcgtccaaatcgctgttcaagcacccggaggtgacgttccttaacctcaacatcagcccctgcgatgccttgaagcttgacggcgtgcaagtgctggctgacgcgcaggtagccctcgaagcattggcggatgccctcggcgattatcgctctggctggggtgggcaggtcgtcgaggccaaggcgcagttggacgccgaagtggaccgtgtgcaccaggtggaatacgacggcgacgcctttgtgcccgaggtcgacgaccgccttgaccgtggcgtgctgcgtgaattcatcgagctgaccggctcgtgcctgactcagagctgcgtactgggcgtgctcaaccagaccctggccgacgacgcgatcatcgtcgccgccgcgggcagcctgcccggcgacctgcaacgcgcctggcgcagcaagggtgtcaacacctaccacgtcgaatacggctattcgtgcatgggttacgagatcaacgcggcgctcggcgtgaaactcgccgagccgactaaagaggtgtacgccctggtcggcgatggctcctacatgatgctgcactcggagctggccacctcgatccaggagcggcgcaagatcaacgtggtgctgctcgacaacatggcgttcggctgcatcaacaacctgcagatcggcaatggcatggacagcttcggcactgaattccgctaccgcaaccctgagagcggcaagctcgacggtggcctggtgccggtggacttcgctatgagtgcggcggcctatggttgcaagacctacaaagtcagcacggtggagcaactcgaagcggcgctggcggatgcgcgcacgcaaacggtgtcgacgctgatcgatatcaaggtgctgcccaagaccatggtccacggctacctgtcgtggtggcgggtaggggtggcgcaagtgtccaccagcgaacgcacgaatgccgccgcgaaaaaactcaatgaacacctggcgaaggcccggcagtactaataacaagaggagtgtttgtatgtctttgaagctaggtgtcatcggtacaggcgctatcggccgggaccatatccgtcgttgcagccagaccttgctcaacagccaggtggtggcggtgactgacatcaacctggagcaggccgccaaggtcgtcgccgatttgaagctggacgctgaggtgtacgccgacggccatgcgttgatcaactcgccgcaggtcgaggccgtgctggtgacgtcctggggcccgagccacgaagaattcgtgctcgccgccatcgccgccggcaaaccggtgttctgcgaaaaacccctggcggtcaccgccgagggctgccgcaagattgttgacgccgaggtagcttacggcaagcgcctggtgcaggtcggcttcatgcggccgtatgacgaaggctatcgcgcactcaaggctgtgatcgacagcggccagatcggcgagccgctgatgctgcactgcgcgcaccgtaacccgacggtggtcgaaaactacaagaccgacatggcgatcaccgacaccctgatccacgagctggatgtgttgcgttggctgctcaacgatgactacgtgtcggtgcaggtggtgttcccgcgcaaatccagcaaggccctggcccacctgcgtgacccgcagatcgtgctgctggaaaccgccaagggcacgcgcatcgatgtggaagtgtttgtgaactgccagtacggctatgacatccagtgcgaagtggtgggtgagaccggtatcgccaagctgccggagccttcccaggtgcagatgcgcagtggcgcgaagctgtccaacgcgatcctgatggactggaaggatcggtttatcggcgcgtatgacgtggagttgcaggcgttcatcgacagcgtgcgcgccggacaggtgggtgggccgtcggcgtgggatggctttgcggcggcggtggcggcggatgcgtgtattgaagcgcagggcagtgagcagattgtgaaggtgagcttgccggatcgcccacgtttctacggctgaatcactgaagaaatgctgtgaaaaatgtgggagggggcttgcccccgatggcggtggatcagatagatattcattgactgacacactgtaatcgggggcaagccccctcccacagttgaatcgggttttcacttcaagcaaggagtgtaggtatgcgaatcggactagtcggctacggccatggagggcgcttctttcatgcgccgctgattgccacattggccggtgccacatttgtcggcgtggtcaccaggtctgcggaacgccgccagcaactggcaaccgaccacccaggcctcaaggccttcgactccatcggccagatcgtcgaagccggcgtcgatgccctggtcatctccaccaccctcaagggccgccccgcgctggtgcttgaggccatcgaacacggcgtagccgtggtcagcgacaaacccttcgccgccaacgccgaacaggcccaggccttgatcaccgccgctgaacgccagggctcgttgctcagcgtctaccagaaccggcgctgggactcggactacctgaccctgcgcaaactgatcgacgctggcgccctgggcacaatcacccgtttcgaatcccgcgtggaacgctacagcccgcaagccgtgggcaacgccagcggtggcggctggttgcgcgacctgggcagccacctgatcgatcaggccctgcaactgttcggcccggttgaccgggtgttcgcccaactgcactacaccgccgaacaccctacggtggaccatggcttctttgtctccctgacccatgccaacggcgtcatctcgcacctgtggggcaatgccctgcaaaacagccaggcgccacgctttcgtgtgagcggcacctccgggtgctacaccgttgaaggcctggacggccaggaagaggccttgatggccggcaagtcgccgaaaaccgaaggcgagcactggggggcggaagaacaccgacgctggggctggttcgaacaaggcccggaacgcgagcgggtgccgtcggagaagggctgctggacgcagttctatcggcagttgcaagtggctgtgcaagggcagggaccgctgccggtggacgcctatgatgcactggaaaccacccgtatattggacgccgcacgcctgagcgccgagcgccagcaggtggtttcaacaaaaatagaataaaattctaaaacaggttgatatggaaattattttccaataaagtcttttccaggttgcataaagtacgttcggactcgatccgcacgactcaacaaaaacaagatcaaaaacaaccaggtaccgtcagatgaaaatcttcaacgctgtactgcgagttttacaccctgcccacacgccacgcgatctgccccgcgcccggccgttttacttctccttccttaatgtgctgtgcgtcgaaaaccaaggcgcgctggtctgctgcattcccggcgcaccggtcgtgcggctgcctgccgagctctgataaacgcaacgtccaaaaaaccaacaagaaagtggagacagaccgttcatgaagaccccgatccgttttaccgcgctggccttgtccatgctgctcgccagcggtgttgccgcggctgccgatctgaagataggcgtgagtatgtccgccttcgatgacaccttcctcacctacctgcgcgaagacatggacaagcaagccaagtcctaccccaagggtgacggcgtgcagttgcagttcgaagatgcgcgtgccgacgtggtcaagcagttgagccaggtcgagaactttatcagccagaaagtcgacgcgatcatcgtcaacccggtggataccgcctcgaccgccaacatcatcaaggccgccaccgcagcgaaaatcccgctggtgttcgtcaaccgccgtcctgacagcccgaccctggcgccgggcgtcgcggcggtgacctccgacgacgtcgaggccggcaagttgcagatgcagtacatcgcagaaaaactcggcggcaagggcaacatcgtgatcctgctgggcgacctggcgaacaactccaccaccaaccgcaccaagggggtgaaggaagtcctgagcaagtacccaggcatcaagatcgagcaggaacagaccgggatctggctgcgtgacaagggcatgaccctggtcaacgactggctgacccagggccgtgaattcaacgcggtgttggccaacaacgatgaaatggccatcggcgcgtccatggcgctgaagtctgcgggcaagaagggcgtgttgatcgccggtgtcgacggcacgccagacggcttgaacgcgatcaccaagggtgacatgaccgtgtcggccttccaggatgccaagggccaggcggacaagtcggtagagaccgcgcgcaagatggccaagaacgagcccatcgagcagaacgtggtgatcccgttccagctgatcaccccggacaacgtcaaagacttcaagtagtccctacataacaacaataagccggcagggcggtcgtgcccgccttgccgatggagtacctccctatgctcgctcaagccgctgtctcgcagcctcccggtatccagccgctgccgctggacgaaccctacctgctggaaatcgtcaacatcagcaaaggctttcccggcgtcgtggccctggccgacgtgcagttgcgcgttcgccctggcacggtgctggcgctgatgggcgagaacggtgcgggcaagtcgacgctgatgaagatcatcgccggcatctaccagcctgacgccggcgagattcgcctgcgtggcaagccgattgtgtttgaaacccccctggcggcccagaaggccgggatcgcgatgatccaccaggaactcaacctgatgccgcacatgagcatcgccgagaacatctggatcggccgcgagcagctcaacagcctgcacatggtcaaccaccgcgaaatgcatcgttgcaccgccgagttgctggcgcgcctgcgtatcaacctggaccccgaggaacacgtgggtaacctgagcatcgccgaacggcagatggtcgaaattgccaaggccgtgtcctacgactccgacatcctgatcatggatgaaccgacctcggccattaccgagaaggaagtggcccatctgttttcgatcattgccgacctcaagtcccagggcaaaggcatcgtctacatcacgcacaaaatgaacgaagtgttcgccatcgccgatgaagtggcggtgttccgcgacggccagtacatcggcctgcagcgcgccgacagcatgaacagcgacagcctgatctcgatgatggtcggccgtgagctgagtcagctgttcccggtgcgcgagacgcccatcggcgatctgctgctgtcggtgcgcgacctgagcctggacggcgtgttcaaggacgtgtccttcgacctgcatgccggcgagatcctcggcatcgccggattgatgggctcgggccgcaccaacgtggccgaaaccattttcggcatcacccccagcagcagtggccagatcaccctggatggcaaggcggtacgcattaccgacccgcacatggccatcgagaaaggcttcgccctgttgaccgaggaccgcaagctcagtggcctgttcccgtgcctgtcggtgctggaaaacatggagatggcggtactgccgcactacaccggcaacggctttatccagcagaaagccctgcgggcgctgtgcgaagacatgtgcaagaagctgcgggtgaaaaccccctcccttgagcagtgcatcgataccttgtccggcggcaaccagcagaaggccttgctcgcacgctggctgatgaccaacccgcgcctgctgatcctcgatgaaccgacccggggcatcgacgtgggtgccaaggccgagatctaccgcctgatctcgttcctggccagtgaaggcatggcggtgatcatgatttcctccgagttgcctgaagtgctgggcatgagcgaccgggtcatggtgatgcacgagggcgaattgatgggcaccctggaccgcagcgatgcaacccaggaaaaagtcatgcagttggcctccgggatgaccgcagtccactgatgtacagaataaaaaggtgatgggctatgaacgcaataacggataacaaacctgcgacggtgccaaccaaaagtcgccgacgcatgcccaccgagctgagcatcttcctggtgctgatcggcattggcctggtgtttgaattgttcggctggatcgtgcgcgaccagagcttcctgatgaactcccagcgcctggtgctgatgatcctgcaagtgtcgatcatcggcttgctggcaatcggtgtgacccaggtgatcattaccacggggatcgacctgtcttcaggctcggtgctggcgctgtcggcgatgattgccgccagtttggcgcagacttccgacttttcccgggcggtgttccccagcctgaccgacttgccggtatggattccggtggcgatggggctgggtgtggggctgttggcgggggcgatcaacggcagcatcattgctgtcaccggcattccgccgttcattgccaccctgggcatgatggtttcggcccgtggcctggcgcgttactacaccgaaggccagccggtgagcatgctctcggactcgtacacggccatcggccatggcgcgatgccggtgatcatcttcctggtggtggcggtgatcttccacatcgccctgcgctacaccaagtacggcaagtacacctacgccatcggcggcaacatgcaggcagcgcgcacctcggggatcaatgtcaagcgccacctgatcattgtctacagcatcgccggtttgctcgcaggcctggccggcgtagtggcgtcggcacgtgccgcgaccgggcaggcgggcatgggcatgtcctatgaactggatgcgattgccgctgcggtcatcggcggtaccagcctggcgggcggggtagggcgcattaccggcacagtgatcggcgcgctgatcctcggggtgatggccagcgggtttacctttgtcggggtggatgcgtatatccaggacatcatcaagggcctgatcattgtggtagccgtggtcatcgaccaataccgcaacaagcgtaagctcaagcgctgattcaataccctgtcgaacacgggataaaatgtgggagcgggcttgctcgcgaaagcggtgtatcagtcaaagatgtgttgactggcagacggcattcgcgagcaagcccgctcccacatggggtctatcgctgacctgtgctaaccgtttgtcttctatatagctccacaacactgaatttcttgctataaacgcactccgataaccattcgccaagcccgtcctggtgccttttggggttatccgggaaaaaatgcctgtcatttcagttgctgcgccctcaagtcggccttagactgccgcccctcgtaaattgagtgccgggtggcgcttgaaatggacggcgcctttccgagacctgcagaggccttccggaacgctcccttattcgccttaatgcacgtattttttatagagaaatcaatgacaaaggaaaagttgctggccatgccggcggatgactacatgaatgccgaacagcacgcttttttcgagaagttgctgcaagacatgaaagtggaacaccacgagcgcattgaacagaaccgtatcgccattgaaagcctggataccccggccgacccggccgacgccgcttccgtggaagaagagcgtacctggctggtcaacgccatcgaccgcgaccagcgcatgctgccgcagcttgagcgcgcgttggagcgcatcaaggaagattcctttggctggtgtgatgacagcggtgagcctatcggcctcaagcgcctgctgatcagccccaccaccaagtactgcatcgaagcgcaagagcgccacgagcagatcgacaagcaccagcgccaagcctgatgcggtgaagctgggggaccgccacgcggttccccagggcaagacccgttacgccctgtctattgatctgctgcaagctaccccactaaaggcccatggataatggcccgatagtggcgtttaatgcagcgacaataatgacaagcagtggggtaacgaagatggctggagacggatctctgatgggcgcagctgtgtcaccgcaaccggtggtacgcgggctgcccggctggctcacgccgttgttgcagagcaccgccctggtgctggtactgctgggcctcgtgtttgccaacttgccgctctacctttgcctgccactggccgtgctggtgatctggctgcctcgcctgaaaaatcgtacgccggttattgcgccttccgacaccgccgatgccattggcgagttgacccgcgacctgtcctataccaccagccataacgcactctccgccgccggcgtggcctattcggtcaagcaactggcggcgcgcctgcagtcgcagttgagtgcggccaagcagatcgtcagcagtgccgaagtgatgatcggcactgagaaggtgacgtcccagctcagccgtgaggcattgagcgccgcgagccaggcccatcagcgcagcaccgaaggccgtgaagtgctggcccagtcgatcagccgcatgcaccagctcagccagcgtgcgaatgccagccgtgagctgatcgaagccttgagccagcgcagcgaggaaatccagcgcgtgaccctggtgatccagtccatcgccagccagaccaacctgctggcgctgaacgcggcgattgaggcggcgcgggccggtgaacatggtcgcgggtttgccgtggtggcggacgaagtgcgcgggctggccgggcgtaccgccacggccaccgatgaagtcggtgtgatggtggccgacatccagcaacgcactgcccaggtggtggagcagattcgccagctctcggcggacctgcacaccggtgtcgagcaggtagagcacgctggcgagcagctgcaaaatatcgccagcctggcggcggatgtggaaggccaggtcaatgaaattgcccagggcaccgacaccaaccgcacccagctcgatagcctgttccatgccgtggagcagatgcgcagcgacctcgccgtcagcgatcagcaaacccgccaactggccgacgcggctgtacaaatggaaggccaggccgaaaccatcagcgagcgtctggcggaagtcgggctggatgactaccaccagcgcatctatgacctggctcgcgaaggcgccagccgcattgccgcgcaattcgaggccgatgtgcagcagaaccgcatcagcctggatgacctgttcgaccgcagctacacgccgattgccaacaccagtccgagcaaataccacacccgcttcgacggttacaccgaccaggtgttgccggcgatccaggaggcgctgttgccgcgtcacgaagggttggtgttcgccattgcctgcacgccccagggctatgtgccgacgcacaacaaggcgttttcccaggcgctgaccggtgatgcgcaggtggacgctgtgcagaaccgcaccaagcgcaagttcgatgaccgtaccgggattcgctgcggcagccatcagcaggcggtgttgttgcaaacctatacccgcgacaccggtgagctgatgcacgatctgtcggtgccgatcatggtcaagggccggcattggggcggtttgcgcctgggttacaagcccgaggccgcgaaaggcgggcgttaggattattgcggtttatgcaagggagctattccggggatagctttttccaacagcaggaaaaccgtagcatggcgaacattgttagccagctaactaatgctgcggagaagttccatgcaaaacaaagtcgatgtcgccgtgatgattggcagtggtgtaccgcaagccttgcgggcattgggtcaaaaggcctgttgggtggtattgctcaatggagagcagcgcggtacggcgttcgccagtcgcgatgaggcggaggagtgcagggctgcctggcaggcgctgttgcggctggagcagtcagacagcctgcattgacggctgcttagtgcggttgatgcaggcgttggttcagctcatccaccgcaatcgcccattcggcgtcgtcacgcagttcttccttgagaaagctggcctgttgtgcggaccagaacggcgcatcgatcagtttcacatcttcgggcagcggatgggcgacgataaatgcgtcgatggcctccggggttgaatccaggcctaattgttcaaacagggtttcaagggtggggattggcgcgtccatttcgttctccatgcagggtggtcgttatgcatgggagggttgtagcgcagcggagttctatcgaatgttcaggaattcagggccccggcatccacagcagtctttaacgccttggcggcctcttttgcagcgacggcggctgcatcgacagttttgaaccagcggtctttttccacttggtgcgtggtcacagtggtcagcggtggcttggcccgcatcacgatcactgcttgaaactcaccatctacttcccttgcgtcgccatggatgaaaaattcgccgatatcaaattccgtcacgtagagccttcccttggagataactgcactggagaaacctggcccgtggggcgcaaacttcagtggacgggccagtatggcagttgttgcgggtcggcggcgcagtaaagttaccgggcggacgaaacgattgctccgtggggggcgtgcaacatggcttccagttttctggccagttcacaggccttgacatggtcgctgcgaaagcctttgatgcggccgctgagcacttcgcgcacgtggaagaagttccggccggcaggtacgacttggtaaagaaccgaatccgggtacccctcgaagctgttcaagcggtagtattgagcctcgtcctgacaggatgaacgggtttgcgaagacatagcgctgtagggtgatcgttgcatggcctgctccttttcgatctggcgggatgactggattgcagcgttttgactggttttgatcggtgctgctgttttagtattgtcgtcagcagtcagcgtccggttccatgacagcgtattcatttgtgtatgcatgtcggaaaactgcatttttaatcgggttattctctgaagttggtcgacccgtattctcgggccgttgaacctgtgatctcctgtggcgcctgatgaccttgcacaaggcccatcgagcatgtctgtactagtctttcggctcgacagcaggattttcttcagttttttcaaagaatgagttgtgtgatcgtgccgtgatggccgtttttttgtgctgcccgctctggcggacagcgctctttccatgtgggggcgtttccttggcagtcagtaatctggatatgcacgcgttattcgtgctgggtgatttgcgcgcaaagttggtcaaacagttccaatcccgttttgtttatattaccgagcagacgccggaaggcatctacattgccgaaatcgataccgaggcggcgatggtggtggatgacaaaccgcgccttgagctcaaggtcggcgaccatttccgggcggcggtattgcccagtcgtgagggcggcaagttcgaattgaagttccgcgatatcaagttgacggtctatggcctgggcgactacgcctttgtgtcctcggccgaaggccagggcatcgtgttcaaggaaggccacagcgtgatgctggtgttcgccgccaacgagcaactgcaggaaggcctgaccaaaaccctgaaggccgtgaccggcaaggccgccaaatggcgcaaaggcgaactggtcaccttcaaggccagtgaataatcagcaaaaaccgcgaacacccgttatctcccggaacctctactacagttgagttgacttaactattcagaggcttcgcgcatacgtagcaaagccgtccgccattggctgcgatatcgcgaggtgcgaaggcatgaaaggattgagaacgctgttggctgcgtcgctgacgagcctggggctgtctatggccacgttgccagtgaacgccgccgaggcgccgatacattttgccgacctgaactgggaaagcggcagcctgatcaccgaagtgctgcgggtgattgtcgagaagggctacgacctgcccaccgataccttgcccggcaccaccatcaccctggaaaccgccctggcaaagaacgacatccaggtgatcggtgaagagtgggccggccgcagcccggtgtgggtcaaggccgaggccgaaggcaaagtggtgggcctgggtgacacggtcaaaggcgcgaccgaaggctggtgggtgccggaatacgtggtcaagggtgaccccgccaaaggtatcaagcccctggcgccggacctcaagagtgtgaaggacctggcgcgctacaaggacgtgttcaaggacccggaatcccccggcaaggggcgctttctcaacagccccatcggctggacctcggaagtggtcaacaaacagaagctcaaggcctacggcctggatgacagctacgtgaatttccgcagtggttcgggcgcggcactggatgccgagatcgcctcgtcgatccgccgcggcaagccggtgctgttctattactggtcgccgacgccgctgatggggcgttacaagttgatccagctggaagagccgccgtttgatgccgaggcatggaagaccctgaccgatgcggataaccctgatccgaagccgacccggtcgttggcgtcgaagttgagtatcggggtatcgacgccgttccagaaagatcatccgcagattgcgcagttcttcgagaaagtcgagtttccgattgagccgttgaacaaggcgctggcgactatgagcgaaaaccacacggcaccacgggaggtggcccaggcgtttcttaaggagcatcccgaagtgtggaaggcttggttgactgaggatgtggcgcagaaggttgaggcgagcctgaaataaccacggatctttcagttcaatgcaaatcaagggtgggagggagcttgctcccgattgcagcgtatcagtcacggcatggtcgactgattcaccgctatcgggagcaagccccctcccacatttagttgcattccaggatcagaaccgggtctgtaccgccaactcaaaggttcgtggtgagcccaagtaatacgccggcgacacatgggcaaactcggcatacacctcattcgtcaagttgcgcacacggcccgtcaccgaggtgtgtgagtccaccttatagcgcaggaacgttccgaacagcgtgtaggccggcactgtctgggtgttggcgttgtccgcatacacctcggctacatatcgggcgtccacgcccccttgccaatcctcggcaaaatcataggtcagccacagattccccacgcgcttgggtacgttggttggcgtgttgcccttgcgcgacaccactgcgccactggcgattttctcgttgaagtcatcgtattcggcgtccacccaggcgaaattgccttccgccagcaactttggcgtgatgcgcagcgagctggccaattcgatccccttggatgactgtgcgccgaccggaatgctgttggtgggatcctgcgggtcggtgacggcaaagtccttgcgctcgatcttatacgcggcaacggtggccgaaccacggccgtccaggtaatcgaatttgctgcccacttcccactgcttgcccgtcgagacatcaaacacttgcgtggtggtatttggctgctcggcggctgtgctgtattgcacatacacattggccgtcgggatgaactggtaggtcaggcccacgcgtccggtcaccggctcccagctgcgtttgaagtggcgggggttggtggcggttattgcgcgatgattggtgacgtccaggtcgatggcgtcataacgcaggccggtcaacagcgacaatttgtcggtaagacccaggcgattctccacgaacaatgccttggtggtgacagcgttggtcttgtccttgccgaagctttcccgggtccgcgggaggtcaaagaagtgtccggggtcaaagttgttggggtctaccgtgctgttgccgggtacgttccacggtgtattggtggtgctgttgaccttgtactcgaagccgccggaccaggtagttgacaggccgaagaggctatcgtcgtggcgcagctcgaactggttgccgttctgttcaccttgatggcgcacctgataggccgtcgaacggtttaccgccgtgttgttcgcgttgtactgataggtttcaaggttgcggtaatcgcgttggctgtccaagtggtaaagggtgtttttcagggtggtgctgtcgttgaggcggtagtcgatgatcgaacgcgcccagagggtgcgctgttcgtagcgcccgtcggcgacgttgtagttgttgaaacggttgtgtttgtcgatcttcaactcgcccgccttggggttgagcaccggcgtgccccagtaggggctgtcttcatgctcatcctgatattccagcgccagggtgtgggacaggttgggcgtgaggtcgctgagcaaggaaaacgccaggctccaggcgtcgcgctgatcgcggtcgatgtagctgtggttggtgttgcggctcacatccaggcgggcgtaatgctgcacctcggcgccaggttcggtcagggcatggttgacgccgaaggccatgccggcggtgtcgtagctgccgtaggtgagctggccttcggcggcttgttcctcgcgggtggccagcttggtcacgtagttgagcgagccgcccacggagcctgcgccgttgatcagcgaggaggggccacccaccagctccacccggtcatagatccatgcatccacggggcgggccagaccagtggcgacattgatgccgttgaacatctgggtgatctggctgctggtaaaaccgcgataggagacaaacccgccaaaccccggcggggcgctggcgttgacgccgggcaaggtgttggcggcatcgcgaaaggttttggcgccatggcgctcgatgtcattgcgattggcgatggccaccgacgccggggtttcccgcacactcaagcccaaccgcgacgctacgccgctggattgatccagggccaggccgggttcggcggcttgttcgccatcgatggtggtcggggccaactcaagggcccaggcgcagacaggcaggcagccgaacaggcctgccaacaggggtagatgtttcatggttgaatcctgaaaagcttgcttgaaaacaacgcacaggcgcccgtacttccttgcggaaacggtgctcagtgcagatcggaaagcgaaggcatcaggtgaaggcaggcggcgcgcgcggattagccgcaggccaggtgaagcgggcagggatgtcggcagccaggacaatggcaggcggtggtgcttggggctgtggcaacaccgccacattcaggctggaactcagcgccgggcccatgccgccggtggaacacagcgggcaaccaaacgccttggacagcgtcggtaaattctcttcagtggaattcgacggcttgggcgcctgggtacgcgggtccaccgtacagaactggccgccgatgccattgagctgcatcccgaccatctgcccatgcccgatactgcaggcgaacacattgaacaggacgcagcagtagagcatccaggcaatgagcgagcggtcggcacgggcaagtttcatggggcggcactttaccatcagccgccgacgaaatgcctgcaaaaaatctcagggcgactatcctgtttcgcaccttttcagggagagccagccatgagctttgttgtcgcacgatggattgtcggggtttttacctgcatcagcatggtccacctgtactgggccgccggcggcaaactcggcttccaggccgccattccccaactgcccggcgaattcgccaacgggcccagacctgcattcaaaccctcggcattgggcacgttcctggtggcgatggggttggtggccattgcgctgttggtgtgcctgcgcgccgggctctacttctcggcggtgtcccacggggcgttgcagtggggcatcagcgcgattgccgtactgatgtttgcccgggcaattggggattcggagctggtggggttcttcaagaaggtcggtgggtcgaggtttgcgcggtgggatacgtatttttattcgccgttgtgtctggtgttgggggtggggttgttggtggtggcgtgggggtgaaaggggactaatgcagggtttgtaaaattctagaagaagaaaaacaggcctgttctgtttttgatcgcaagggtgtttaaagcaattattttgctcatagtagatgagttttcgtgcgtcaaatggttgttgaggatctctaaggttttggtgagctcctcaacgttgtaaatggcttcgtcttcgtaatcgtcgatgatttttccaagcgtggtgtttatcgcttcaagcacgccggactcaataagttgtccgtactcttcgcgggtaaggataacgctttcgagtaaagattctgggcattcgtctacgtctaataaactcatggcctctaaggtgagtggggtgcagattactttcattttttgtgtgcctttttattaaagtgtgtcgcttcattgtattcgctttgcgttctaccgatttgctttcctgagggagatatcctgttgttaggaaccacgccctcaaggctcaagtagcgccttttacccggctgtgatgggtcatggattctgaagtagtccccgttgaggtcttctacaatttcaatcccattttcagggttcttgtagatcttcttgcctttgtctgtcgtcgtcacgattgggtgagtgccggtaaacttgacaatgttttcatctaagcttgctacctcccactttgaggagtacttggctgcgcgctcagctcccccagttttaggaagttcagcttcccctgggtgcacttgtgctgacttaaccggatccttagcacttacctcttccctgcacccgttatctccagggcagttattcaaccccaacggatcaatccatcccgttgggtttggcacgtacaggtacacgttgatcccacccgccaacttcaccgggtccggcgtcaggtagcgaccaacatccggattgtagtagcgatggcggttgtagtgcagcccactttccggatcgaagtattggccctggaaacgcagtgggttgtcgacttttcctatatcgaggcgggttatttcgccgtaggcgcggtaatgcgcggaccagacgatttcgccgtcttgggcagtgagttcctgcggggtgccgaggtggtcaagttggtagtggtaggccttggtttcctttggaccgaaaccttccaacagcgccagcgggcgaaagctgtccggttcgtagaggtagctgcggtgccgatccgcgtggtgttcggcgatgagtttgtcgccttgccagaagaattcggtcgtaatcccatctacggttttactgatacgccgcccaaacgggtcgtagcggtagctggcgatctggccgtcaggtcgggtaatgccgatcagacgatgctggcagtcgtagcggtattcggtgacgagtgcgtggcccttgccactccgttcgcgaatcaggttgccgaaggcgtcatagtcgtagtggtggtcgccctggatcatcaggcggttgccggcgacgatgtcggggccggggcggttgtgcatcagcaggttgctggcggggtcgtggccgaagcgttcttgctcgccttgggtgtggtcggcgcgggtgaggcggttgagtgggtcgtagtggtagcggtgttcgcccttgcgggtgtcgagcaggcgggtgaggtttccggatttgtcgtagtcgtagtggcggcggtatagcgggccttcggcatcaacgatgctctggttgaacaggcggccctggtggtcatgttggtagtggctgaacagttggccttgttggcgttgctgttcgcgaccggccttgaacaggtgtgaggtgagtaccgcgccgttcagttcgacggtggcgaggtggccgcctttgtcgtgattgaaggtgaggcggttgttgtccggcaggcgcaggttttgcagctggccgcaggcgtcgtaggcgtagcgcagggtgccccagccttggtgttcggcggtgaggcggttttggctgtcgtactcgtaggccagggcccagtggccgtcttcgacacttaggagattgccctggcggtcgtaggcgtaatcgacggtattgccatcgggtagggtttttctgatgaggcgtccggcatggtcgcgctcgtagcgggtaaccagctgactgccgtcatcgccgtgttcggtcttttcccgaaggttgccgttgaggtcgtacacgtacgccgtgcgctgaccgtcaaacccggtttcctgctggatcaggccgttgctgtggtactggagccggtaggtctcgccaacctcgttttcgatctcggtcagcaacaagcgcgcattgtcgtatcggtagttgacctgggtgccatcggcattgatgcgacgactgatcaggtgcaggccgtcggcgtattcgtagcgggtgatgtgcccgagttcatcgcgctcggcggtgatttttccgtaggggttgtagctgtattccttgaacccgtcgcctggcagcacaacgcgaatcaaccgacctacgttgtcccactgatactgggtcagcgcgccgtgttcatcttcccgtgcaatctgtcgccccagatcgtcatagcgataacgcttgatcccaccattgggcaactgctcctcaagcaactgcccacgctcattccacaccagccgctgacagctgtggtccgggtaccaaaccccaaccagttgcccatatttgttgtagctgtagtcagtcacatgaccgtcaggatcgatcttgcgcgttacatcgccctgaccgttgcgctcatacttccaaaccgcctgaccccgccttacaacgcgtacgaagccgttgtcatgctcgtaggtcgtcggctcatcgtcccccggaaacaccgccaccaagcgcccggcttcgtcgtactgatacgccgtgatcgccccgagcgggtcctgctcaaccgtcagccggcctctgtcatcgtaggatttgaagtgctcggcgccatccggatccactcgctgcaccagccgcgcccgctggtcatgcacgtagacttcctggctgccatcggcgttaaacaccgtgacctggccgttgtcatcccaggcataacgcgtgtccatctgcgagaaactggcccaatgccgaatgcaccgcgccgccttgccagcccgttcccattcccagaagaaactcgccccaccggccaagccgcgctcaagaatgacgtgctgttcgtcgtagcgataaacctcgctttcaccgacggcattggtcgctgaaaccagtcgtcccaagtcgtcatatgcgtaggaaacaaccgtctgctccgtcacccacacaaacggaccgtcatccacaacgcgatgaatctggtaatccaccgccacaatccggcccgacacatagcgcaaacacaacgaacgcccgacaccgttatccacccgctcaatgcgccccagaaaatcccgagaaatacgcagccggttgtcatacgcatcgctgatcgctgtcagcacaccgtcgcggaagtggtagaaacgtgacgcctgcgccagcaccagttcatcgggcgcagcacccaaatagatcgccgcttcggccaggctattggtgatcgcaggtcgagaggcagtaggcaagggcagggtggtcgaccgattctcatgatcggtccaaaccaccgaatcaccctcaaccaccagccgatgcgccagcgagtgactccagccaaaccccagcccgcaatccatttccaccgcactggtgcggtacaagcgagtccactcaaccggcaagaccccgtccagcgtgccatcggtaagggtcagcaactcctcgccggtgaccatcgacaccgggcagccgttggtggcggtcttgtccgaagatgccgccgcatccccattgggattgcgagcagaagccggcacatcatccacatgctcttgctgcttcagcaccgcgttctgccgcgccttccagcgcatctgcatcgtgccttgcttgagcccgccgaccaccccgcgaaccgccaccgccttgtagcgatccaccgcctgcatgaacttggtcagaatcgccaacaggcccttaacaaaacccaccgccgcctcaacaatccgcgctccatacttgaccaaccgcaagctcaaatacgccacacccgccgccggcaaggcgatggtcaatacggcgccaatcaccaggtcaatcagcagcgacaccacaaaccctgctgctacctcggccatctcaccgggcggtaatgcgtccagccagagcatcgccgtacgtaccatcaggtacagcgctgcctcgtcactggcgagcaacatcgcctgttccatgaccttcggcgtgtcggtggcgatttgcgccaacctggcggcctgctcacccaactgctcaacgaacgccaacgggtcttcaagaattgcctgcaccagcttgatgctgtcccacacgtcgcgaatcgccgcccaactgcccgccaataaaccgctgccaattgcactggcggtcgagcgctcccaatgcggtttaaagccagaccactgctcccgaagccactgctccaaatccctggtcaacccggcgtaagaggcaaataacgcgtcaacctgttcctcggacacgccaccctgcacccgcacctgatagcgcccgcccgccgcacagtggtgcgagcccttgccctgttcatccagcatgaccaccgtggaactgccgtcatccaggccgatgacctccactgggatattgccgattggcacgtcatacaccgactcgaacttgctctcgatcttcaactcaccgcccatcgcgcagcgggtcacgctcgaaaagtcagcgtcggaaacgcttaccgaacgctgcgaatcccccacccgcaacacccgatccatccccagcaacgacggcaagtctgccgcatgactcagcgaatccagcgcacgcgaataccaggcgttcatctgctggcgataactcaccaggctctgatgaaagccgtccagttccatttcgatcagggcaatgtgggaagcgttggtcatccgtgacgtctcggcaaagggcaagacgtcggagcatgccccagcaaaaagcggctggatgaacggttggaaaattcagaaagagcccactgcgctgggggaaaaaccgcgaaaaatcagctcgaagtgctacaccgaaaagcgataaacctgattgcagaattgcccgccaaataaaaatcgctcgcatccttgcccgattccccgacatggccgtcatggttaatagaacctcccttacgcaggatttcccatgtcgcgccttgctcgtcccttgcacccactggccctgtcagtggcgatggcttttgccgccgtgccgttgctgaccgtccagtcctcctatgccgaagagagcagcagcgcgttgcgccgtttctcgatccctgccggtgacctgagtcaggcgctcaacaacctcgccgaacaggcgggcctggtgctggccttcgatgcaggcctgacccgaggcaaacgcagcaaggggttgagcgggcaatacgacaccgacgtggcactgaaccaattgctcgccggcagtggcttgcaagccttgaagatctccgccgaccgctaccgccttgaaaccatcccggataacggcggcgccatggagctgcaggccaccaccatcagtggcgcgtaccatagcgaaagcccgaccgggccggtggccggttatgtggccacgcgcagtttgtcggggaccaagaccgacactgcgctgatcgaaaccccgcagtcgatttccatcgtcaccaaagaccagatgcgcgcgcaaaacgccgagagcctcaaccagatcctgcgctacagcgccgccgtcatcccggaaacccgtggcgccactgcgtcgcgccttgaccaactgactatccgcggtttctccccggccacttacctcgatggcctgcgcatgccgtcgagccgtgacgccctgccgcagaaagacgcctttgacctggagcgcgtggaagtgctgcgcggcccggcgtcggtgctgtacggccagggcacgccgagcggggtgatcaacatggtcagcaagcgcccgttggatacgccgtttcatgaagtcggcgtggaatacggcaccttcaacaagaagcgcaccaccttcgacttgagcggcccgctggatgatcagggcgtgtattcctaccgcgtggccgggcttttcgacgatgccgatgggcaggtggagcacaccgagacgcgtcgtcagtcattgtccagcgcctttacctggcgcccggacgacgccacttcgctgaccctgctcgggcatttccagaaggaccccaagggggcgtcctatggctcggtgccggcctggggctcggtactgcacagcccgacagggcgcagcatcgatgtggatttctacgatggcgaaaagaatttcgagaaaagcgaccgcgagtactactccatcggctgggcgttcgagcatcacttcgatgacgtatggaccgtgcgccagaatgcacgttacctgcgcagcgaaggccagtaccgcagcctctacagcaactacctgatggcggattaccgcaccatccgccgctcgaccatcgccagcgatgtcgacctggatgcctacaccctcgacaaccagctgcaggccaaattcgacaccggcccgttgcagcacactttgttgatggggctcgactaccagaacaccagcaccgacaccaagtccggttccggcgtgtacactgcaggcccgaccctggatattttcaacccggtctatggcgcggctgtcccggtgccggcctacaccaccgacggcacttcgcgcagcgaacagaccggggtgtacctgcaagagcagatgaagtgggataagtgggtgctgttgctgggcggtcgctatgactgggccagcaccgataacagtacccagaccatcagcacgggggccaagagcaagtcgtccctggacagcaaggcgtttaccggtcgtatcggcctggtctacctctttgacaatggcctggcgccgtatgcgagttatgcggagtcgttcaacccgcaatcgggcaccggctacggcggttcggtgttcaagccgaccgaaggcaagcagtacgaaatcggcatcaagtaccagccgccgggcagcaacagctttatcaccgcggccatcttcgacctgcgccagaccaacgtgctcaccaccgacccggaccccacccacctgtgcggcaccgggcgctgccagagccaggacggcgaagtgcaatcccgtggcttcgagctggaaggcaaggccagcctcaacgataacctcgacatcacagcggcctacgcgtacctggacaaccgcatcagcaaatccaacaacactgtgcgctatgcgcccatcagcgatatcggcgtaggcccggccatcgccgccgaaggcaccaccacctacggcgtgccgcgccacaccgcctcggcgtgggctgactacaccttccacgacggccacctcaagggcttcggcgcgggtgcgggcgcgcgttatgtcgggtcttcctggggcgatacagccaacaccctcaaggtgccgggctacaccttgttcgatgcggcggtgcactacgacatccccaacattaccagcctgaaggacaacctgcgcctggcgctcaacgccaccaacctggcgaataaagagtatgtcgcgtcctgctactcctattcgtggtgctggtatggctcgcagcgcacggtgcaggcgagtgcaacctatcagtggtgataaggcaatttaatggcccccttgtaaccaaatcctcgccagaatcgcttttattttcaggtggttaggcgaggatgcaaatgcgcactgttggaatcatgctgatcgcctgctccctggccggcggcgcggctgccgtgcaggcacgggagttgcgcgaaggtgacaagtacatgtgcagttggggcgccggcacggccgccagggctcaggagttgaaactgtcgggggtgtcgctgtatgcggcgcgacagaagatccagagcatgaagttcaacaaatcctggatgcgcatgatggccatgggcatcaccgaacagacctacgacagccgttcgcggctcaagcccgaggccattcgccagggtttctatcaggattgcgtgcgctacaaggtcgcacgcaaatgatcgagcaagcaccggccagtacaaaatctgcgtaagcctgtccaacttttcctcggcggccctggccatactggcgccaggtaaacccgaggcacaggccatgactgactacgtattcacccccgcgccaaccccaaccctcgcagtccaaggcagtgatgcgcgcttcccgctgcgccgtgtgttctgcgtgggccgcaactacagtgagcatgcgcgtgagatgggtcacgacccggaccgcgagccgccctttttctttatgaaaccggcggacgccgtggtacccgccgaaggggtgatcgcctacccaccgctgaccgccgacctgcaccacgaagtggaactggtggtggccatcggcaaggacggagtggatatcgccccggaacaggcgttttcccacatctgggggtatggcgtcggcgtcgacctgacccgccgcgacctgcaagcccaggcgaaaaaactctcgcggccgtgggagtgggccaaggcgtttgatgcgtctgcgccgagcaccgcattgcgctcggtgagcgcggtagggcatccgtccagcggaaaaatctggcttgacgtcaatggcgaacagcgccaggtgggcgacctggccgaccagatctggtctgtcagcgaagtgatcagccatgcctcaaggtctgtcgcgctgaaggttggcgacctgatcttcacgggcaccccggcaggtgtcggtgccttgcagccgggcgatgtggtcacggcgggcatcgagggcatcggcgagttgcagttcaccctcggccaggcttgaggctaaagtggtgacccggccacccgagagaccgttatgccaggcacccgcgtcaccacctacggcatggaacaacgcagcgaccgccccgacttctacatccgtgacaagcgcgggcgggcgccgctgacccgcccgcatcggcatgaatacttccagatccagatcaaccttggcggcgacaccgtgcagcacatcggcggcgcggtgcggccgtttccgcgcaaggccctggcctttatcctgccccatcgcctgcatgtgattccccatcccgaagacggcgagttcatgctgatcaacttcagccagggctttttcctgccgcaactgacctgcgcccccctggacctcgaagacattcccatcggccaggcgcccgagctgtcgccgtttcgcttccaggaacacctggatttcatcctcgatgacgcagcatttgagcaggtgcaaagctggctcactcacatgcgcgaactggatgcccaccgcaccttcggcacccgcgaacgtctcaagggttacctgtttcaaatgatcggcctggtctgcgaacaatatgccgagccgttgcaggcgttcgccgccgataatgccacccggcgcgggcgcaaggatgcgttggcgcgggtgcagcgctacatccgcgagcatctgcacgagccgaccctcaaccttaccgacacggcagcggcggcgttcctgtcacccaactacctcacgcacctgttacgcaaggagaccggcaaacccttctcgcaactggtgctcgaccgccgcttgctattgacgcgcaccttgttgctcaacagtgcgcagatgatcggccccattgcacaccgctgcgggtttaccgatgaagcgtacttttcccgttgcttccgcaaggcccatggcctggcgccagggcaatttcgtcggcagcagcatggcgagtccttttaggcggcggtttacaaatccacgacaatcgctatgtttctatttgcatacaattgcgtccttcattgggaggccagtatgcaaacgcttatccgcgcagcgacgcaggacgatgtcgacacgctcttcacccttcgcacctcggtggtgcaaaaccatctgagtgtcgagcagatggccgagttgggcatcaccccagaggtgctggccgacagcatccgcgaagccccctgcgtatggatcgccgaagtggatggccggcccgtggccttcagcatggtcgacctggcgaccggcgaggtgttcgcgatgttcgtattgccgtcccacgagaacctggggctggggcgtcgactcatggcggtggctgaagccgcgctgtttgcacaccatgacaggttgtttctgatcaccgatgggcgcgacgaaatccgcgccaacgggttttaccaacgcctgggctggaccctgacggcgcaggtcgaggacggcgacgtgcgttatgagaagagcagggcgcagtgagccatgagtccacccgagccgccgtccaacaactttcgctacttcgtgttcgcagtgcttggcgcggcggtgttgctgggggtctattttgtgcagctcaatgcccaggtcgaccgcgagcgggatgcgaccaatgagcgcttggcgctgtgtcgacaggtggaaagtgtggcgcgctcggtgttgcccaatagcctcgatacacaagatgcctgcgaacagttgagcgagcgtatatcgaaaagtgtgacgtcgccttaactcattaacccttttttatcagtggaaatagtgccagtagttgcaccaaaaagtggcatttatagggttggctaccttaaaaaacgtgtggttattgaatgacttacagcgcttttaatccgacgaaaggattaaaataatcttgttacagctttttacaatcgttactatagccgggcgtttacctcccacggtttatgcatttttaaatcccaagtttccatcagctacttgggattttttttgcttggaatttgaccttcgcgtcaaacttcaccgtcggcgaactccgcgcgcatccggccattacgcttggcctggtacagcaacttgtcgacctcttcgacgaaccccagcatcggcgcatcaggtttcacgatacgtgtacccacgcccaggctcagggtcagcaggctcgataccgccgaataaccatgctcgatctgttgctggcggatcaggtgcagacagcgttgcgccacctgcctggccgattgcgcatcggtttccggcagcaaccacacgaactcctcgccaccgatacgtgcaatgaaatcccgtggccgattggctgcctgggacaaggtgtgcgccacctggcgcaggcactcatcgcccttgatatggccgtagtggtcgttgtactgcttgaagaaatcgatatccagaatgatcaacgacagcggcaactggctgcgctgggcgctggcccattcccgttccagcacggtgtcgaacatgcggcgattggcgataccggtcagaccatcttggtaggaatattcctcaagttgtttctgcaagcgcaccaggtgctcttcggtcttcttgcgctcgctgatatcgaacatgaaaccgatcagcgcctcgacctcgccgtccttacgcaccacgtgcaccacatcgcggatccacacgtagtcgccattcacgctcagcgcccggtagtctgcctcgtgatccacaccggcgcgggactgcgatacgcagaaattcaccacgtattcacggtcgtccgggtgcatgcgctcgacccagtcgtccacactgacccagctttgcggggtccagccgagcaacgtctcgatctgcgggccgatgtaactgaaggtcatgctctgccaatcaatgcgccaggggatggccttggtcgactccagcaaggttttgtacacatcgctgtcgggctggctcggagggtcgatgctcatggggcggctgctctggatgatggcgaaaagccaagagcgtctttcgatcggggcgcttagtcaagccttcggcggcgcagcagacgagaggtcgccaaacgggtttctggcgccagcgggccggcgtttccacaccgaaatgaggcatggctaacacttttgcacgaaccgctccatgccccgcagaacctcgtctactctggttccatcacaacaaccgggtgaggcccaggggtggggacttgtcatgatttcaatcattgaattcaaccgcatcatggcttcgggtttcctgccgctggcgtgcgattgcaccttgaacagcgacggctcgttgcgaatcactgtcttcgaaccggtgtccggccgggtcgacctgctgctgaccggggtatcccccgacggtttggacagcatccgttccatctcaaacctgattggtgagttgcgtaccgagatcaaggccgggcgtcgcgggtttgctgcggtgggttagccgttgacggtgtgggtgggagtatccagcgcgccgtaatagcgccagcagcaatggcgatgttccggcacgatcacgcagccgctgaggctgacgatcagcagtgcggcaaccagcatgtaaagtcggcggtacatggtgtttcctcttgggttgatcagcgttaatccttcaacgcagtcaccgacataaatccgtcgcgaagctttcaaacatttcatcaagccctgccaccccctgcgcaatactgctgaaaaacctgcgacggattttcctgcccccgccgttcaacccatcagcacccgcactttcgcgtgttgcatgaaggagttgccatgagatacctggccaaattgcgctatgccttgcttgctccgctggcccttgctgcgtttgtcagcacccccgtgtttgcccagaccgaaatcattatccgccagccaccgccgccggaacgtgtggaagtgatccctgtggaacgcccgggttacgcctgggaccgcggccactggcgctgggaagggcgcggctacgcttgggtgcccggtcactggcagccggtgatgcgcaatgcgcgctgggaaccgggccattgggaggctcacggccctaattggtactggcgcgaagggcattggatccgctgaccgagaattgcccgattgaaagacactgatccggacgtggaactgctggcgcgcatcggtaacaacgagcctgcggctgtcaacgaaatggtgacgcgcaaactgccgcgtctgctggcgctcgccggccggatcctgggggatgccgacgaggccaaggacgtggcccaggaaagcttcctgcgcatctggcgccatgcggccagttggcgcagtggcgaggcgcgcttcgacacctggctgcaccgggtggcgctcaacctgtgccacgaccgtctgcgccggcgcaaggagcgcccgttggaggacgaggaagcgttggcgctgacagacagcgcactgacgccggatgaacagctggaagccgccgaccgcagcgcccggatggctgccgccctggcggcgctgcccgagcgtcagcgcgaagcgattgtgttgcagtactaccaggagctgtcgaacatcgacgccgcggccctgatgaacatcagcgtcgaggcactggagagcctgctgtcgcgggcccgacgccagttgcgcagccaacttgccgacacacccgggcttgcccgcccaggaaggggaaaaccatgacacccgaacgctttgcttacctggccgacgcctatggcgccgacctgcaccgctggccccgcgccgaacagcccgcagcccaggctttgctggacagcggcaatgtgcttgcgcatgaggcccagcaacaggcgcgctggctcgacggtcaactggacagccatcaactggcctacgtcgatccttcgctggcacggcagattcggctgtcggccccgcgcggccagtcattctggtcgcgctatgcccgctggttgtcgccggccggcctggtaggcgtgggtgtcgcgggcatcgtcaccgggatgctcgtggcctccctgagcgtgccgctgccgatgtggtcgtccgaggtgttgcccagcgtcttcgatcaaggcgatgcgcaagtcatctttaccgtcaatgccgaggacaccgagcaatgagcctgaagtccctcaaaccctggctgctggcctcggtcttgctcaacgtgttcctgatcggcggcgtcggcggtggcctctaccactggatggccagtgccaagcccgctgaggcggtggtcaaccagcacggcttgcgccaggcgatgatcaagctgccgccggagcgccgccgggaattgcgccaactgctgcggcacaaccgggccgacagccagccgctgatcatggccgggcgtgaagcgcgcatgggcgtgatcaagcaattggaagcgccgaccctggatcgggatgtgctggtggcggaactggccaaggcccgtgaagccgatatggcgctgcgtgcgttggtggacacgacgttggcgcagttcgccagcaccctgcctcgggaggagcggcagaagttagtggaggcgttgtatctgcgggggcaggcggcaggccgcaagccttagtcctgaacgtggcgcttgtaggtctgcgcccggagcgctgaactacaggcgacgcagaaaggatttgacgatgtggcgggtggcatcggtggtgtccaactcgtccatggcgccataggggtgccactggcaatcgacgatttcattgcaaggtttcgcatcggcgacgttcaccaccgacgcttcgaacacgtggtgcacggtgtcgcgggccttgagttcctgcaaatacagcaagccgtccacgttcaatccggtttcttcttccagctcgcgctcggccgcgccgaccgggcgctcgttgcgttcgaccttgcctcccggcaatgcccatttggatctggccttgcgcacgaagaggatatgcccctcgtgttcgcaaatgaccgttgcacgtattttcatcgtctgtgccccgcagcgggatgagtgtcataaaagtgtaatgcaattgtcatgctgagtgcttatggcgctgacgtgtggggatgtggatactgcccgattgatcaaaacgcacgaggagggcagatgagcaccgtacgctggggcatgatcggctgtggcagtgtcactgaattgaagagtggaccggctttctacaaagcgccaggttctgcgctggtggccgtgatggggcgccgcgaagcggcggtgcgtgattatgcggcacgccatggcattgcgcgtttctacaccgacgcccaggcgctgatcaacgaccccgaggtggacgcggtgtacatcgccacgccgccggacagccatctcgaatatagcctgatggtcgcggcggccggcaagcattgctgcgtcgagaagcccatgtcgctcaacgccgagcagagcgcgttgatgcagcgcaccttcgagcgtgccgggctgcatctgtttgtgtcctattaccgccgttcgctgccgcgtttccagcaagtgcgtgactggctgcgggaaggacgcatcggcgaactgcgccacctcacctggaccctgtgcaagccaccgggcgccaatgatgccagcgccgccaactggcgcaccgacccggccatcgctggcggtggttactttgccgacctggccagccatggttttgacctgttccagtacctcgccggggacatcgtcgaggtctcgggctttaccgcgcgacaagccggggggtatgcggccgaggatgcggtgacggcgtgctggacgttcagttcgggcgcactgggcatgggctgctggaattttgtcgcggaccgtcgcgaggaccgggtggaactgatcggcagccgtgggcgcatccgattctcggtctttgaagaccagccgctgcaccttgagggtgaaaccagcgaggtgctggaagtgccgtgccacacgcatatccagtggcaccacgtgctggcgatgaatgcgcatatccgtggcgaagccgagcacccatcgctgggtatcgacgcgttgaagaccgatcgaatcctggacaaggtgctacaacgtaacccccatcgtcccgggtaggcggcatagggtggtcttttttccaaggaacagacagatgaaatactggatggcggtatggctggtactggcgacaagtgcgatggcggcgccgcgcagccaaggcacaccgggggagtttgatttttatgtgctgtcgttgtcgtggtcgccgaccttttgcctgacgcacccggacaacgagcaatgttccggcaagggctacggttttgtcttgcatggcctgtggccgcagtacgcgcgtggcggctggcctgcatcctgtgcgccgcagtcgccgttgagtcgcgaagaaatcgagaagggcgcaacactgttcccaacccgctcattgcttaagcacgaatggtccaagcatggcacctgcagtggcctggaacccttggcctacctggaaaaaaccgaccaggcgctgggggtggtgagcattccgcagcaactgcagccgttcaatacgccgccgtcgctgcaggccagtgagatcgaggcgttgttccgtgaaagcaacccgcgcatgggcaatcatgggctggcagtcatctgcaaaggcaaagtgctgtccgaggtgcgggtatgcctgaccaaggacctggccttcgccggttgcccgcgcagtgtgaaaacccaatgccgcgatggcgacatccggattcccgcgcagcggtgataagccgctggcgggcatcgggttgatcagttgttgaggtagaccgggctgtcggtggacaacgaggccttcacggccagggtcatgtcggtgatcaacacttcttcgcggtcttcgctcagggccttgagggtgatggcgaccacgtcctggggcgtgctcttcggcgcctgcacgtcggccaccatatcggtgtcgatgtaggcggggtgcacgccgatcaccagggtcttctgttcgcgcagttcgccgcgcagtccattggtcaggccccactgggcggacttggaggcgctgtagccgccagtgccgggcgggctgagccagctcaataccgacagcacattgatcagcgcgccgccgccttgcctggccaggatcggcgcaaacgcacggctgacgcgcagggtgccgaaggtgttcacgtcaaagtgctgttgcaggttttcgacgctgtcttcagccagcagcgagccgtatttcaggaaccccgcgttgttgatcaccacgtctacatcggtgcactgctcggcggcgcgctgcacgctggcctggtcggtgatgtccagggcaatcggcgtgctgccggggaggttcacgctgcctggatcgcgtgcgccggcgtagaccttggccgcgccggcttccagcaaggcaatgacgaatgctttacccaggccgcgattggcgccggtgaccagtaccacttttccacgaatatccatgatgcgctccagacagttgttaggtttaataatgaaaccgtttttatcctgagcctgttggtcctataatgcaaccttattttgcaagtgcccggaggcccaacgatgaaacgcaaatgcctggaaggcgatggctgcccggtggcccgcgccctggacgtggtgggcgactggtggacgttgttgatcatccgcgacgcctttgccggagtaacacgtttcggtgattttcaaaaacacctgggcgtggcgaaaaacatcctcgccacacggctcaaggacatggtcgagcaaggcctgttgcagaccagcgaagtcggtgcgcgcagcgagtaccagctcactgacaagggccgtgcgctgatgccggtgctggtgacgctggcgcagtggggccaggcctataccgagccggaggaggtcggcgcgcaagtcttggatgcgcgctcgctcaagccactgcgcaaggtcgagatcctcgccgaggatggccgagtgttgggcatcggcgacatcgtcacccagatgcccggggcttgaggcggtgcctacttgctgtcgaggaagcccagcagggctgcgttgaacaacgccgggtcttgcaggaacgcaaagtggctggtgttcggcaggatcagcaggccggcgccggggatggttgcggccatgtactcggtgtgttcgcgcttgatcgcttcgtcatggtcgccgtcggcaatcaggatcggcgtcttgatgctttgcaattgtgcgtcagtccagttcggttggctggcccacatatggctgatctgctcgacaaacgcgtcgtactctttcggcgtcggcgacagcttggcgtactccttgccggcgcgctcgatgaaggcggcaaaggtcgggttcttctcgacgccgtccttcacgcctgcggtctgggtgttggcggcgaaggcgaagactttgccgaggcggtccgggtgacgcagggccaggtcgatgccgatgatggcgccgtcgctccagccgacgatatcggcgctggggattttcaggtggtcgagtacggccaccacgtcatcggccatcaggtcataaccatagggtttttcatcccgcgaactgcgcccgtggccacggctgtcgatactgatcaccgtatgccttgccgccaaggccttgacttggttaccccaataatcggagttggacaggccgccgtgcagcagcaccaccggcgagccatggccggtacgggtgtagtagaccttgatgccgttgacggcggcatagccggtctgggcaccggccacaggggcgggcgttggcggcagcgtttcccagcgctcagcggcttgggcggcggaaaaacatagcatcaggcaggcggctgccagcaggcgacgtgacatggcggttcctttttttgatcaggagggattgaactctagcatcgccccccgcacggcaaatacgcatttttgcctatcaaaatcgcctgtgcgaaagaaaaaaatgcagttatatcaatggaataaaagcgtctaagcgagcgaggggcattttcttcaatacctcgaccgagtggcccccttaccgtggccccatcgtcattcgctcgaataacaaggaactgcaatgagtctgatcatttccatggctgccttcgcactcgccacgtctatcacccccggcccggtgaatgtggtcgcactgagttcgggagcgcgtttcggttttgtcgccagccagaaacacgtcttgggcgccgccgtgggcttcacgttgctgttggtgttgattggcctggggttgcatgaggtactgatacgttggccgatactcacccagttgatccagtggggcggggtggcttttttgctgtacatggcctggaagttggcggtagacgatggccggctcgacgccgatggcagtgccacggcgccgtcgatgctgtatggcgcgatcatgcagtggctcaaccccaaggcctggctggcgtgtgtggcggggatggggttgttcgtagccgatggcgatgcacggcaggtgtggttgtttgccgggctctacctggtgatctgctatctgtcggtggcgtgctgggcctatgccggcacgtttttgcggcgctacctgggcaacccccagggcgtgcgcgtattcaaccgttcaatggccgcgttgctggtggccagtgtgggttatttgctgatggcttgagcacgtcgcggtattgccctggcgttgcggcgaaatgctgtttgaacgcgcgctggaaatgcgcctggtcggcaaaccccgccgccagggccacgtcggcgatgggcgcgccctgacgcaatcgggcgcgagcgaactggatgcgctggttgaccaggaaggcatggggtgtcagcccgtaatattgcttgaaggcgcggatcaggtaggacggcgacagttcggccgccaggcagatgtcttccagcttcaccccttcggtgcagtgcgtgcggatgtactcggcggcccgctccagcttgtggttgacctcgcgcagcggggtgccggctgggttgaggcgctgttgtacgtcgctgaagtaactcaccagcgcgtcctgtttctgcaagtgctcggcctgttcatcgaccagaatgcggtacaactccagcaagccacggtacagcacggcgtcctgggtatggggcgtgttgaacggccggtaaccctggtcggtgctgaagcccaactgatgctgcaactccgtcagccagggcgtgtcgatgtacagcatctgataggaccacggctcattatcgatggggttgcaggcatgcacatcgccggggttcatcaacaccaccgtgccagcgctgatctggaacgtgtcggtgccatagtggtagtagctgcgcccgctggtgatcgcgccgatggaaaaatgctcatgggcatgccggctgtaggtgaccttgcgcccatcagcgatggtgcgcgcctcgatgaaggccaacgcggggtcacgccagaaacacggagcagtggcagcagtcatgggcgggcgcttcctcgcagcaggtgaacgggtagggcagcagcgtcagctaaaacccgccattgttcaagccctggcgtaccagtggtgcatagcgtcgcaggtagtcggcccatgggtcgttgccgctcaccgcctctgccagggtgatcggcagccgggcattttcacgtagcgcctcaccgtcatgcagcagatgccgctcgacgatgacacgggtcaatgcgcgggtgcgtggtgagtcgaaggtgcgcgggacccggcgtccgaagaggtccggtgcgggtattgcggcgggcgccaggttgtcgagttgacgaatgaccagggcgttgtcggcagtggtcagcgccacctcggccggtcgggttccttgcgcataggccggccagtcgaaacgcatccaggcactgctggcgccgttctcggccgcgtgtgtgacctgttcatagtcaaggtctggacgtggacgaaccagcaggtgcctgggaaagatttcatagaacttgcggtcgccgtagtgcgagacatacatcagcacgccgaatcggccgacatcggcagcccgccgctgggcaataccgaaaaaccccaccaggccgtactccagggcttcacgactgggcaaggtcaggtgcgacaaccaataccggatggcagtcccataagcgtctttcagttgcccgagcttgcggtcaaaggtctcgaaaaacagccggttgatcggggtcagcaaatggaattgccgagccatttcccggtatttgaccgctgtgtttgtggagtgccagcgtgtcgacgtgacatcgagcgcgccagcactgtgcaagtcgacgaacgagtacagtgggccgctgtacacaccttcgaaacggccttcttcggaaaatggcgagttttccggcaggtacatcaatactggttgatccaacagaggggtgttggggtaaaccctgcgcagatcttccagggcggtctggcgtagggtcaccacgggctgcgcaaacgtctcgagcgcggcggcaaggctggctcgctgttggttgaggctgtccagcgccgtgttgatcgcctgcacatcgtaatgcggttgagggcccagtatgccgttgaccacggcccactccagcaccggcggcgctgcttcgctgctctcgataaagcgtttccagctgccttgtggcgccagcccggccaggaacatgatctggctgtaggtcaattgacgggaagaccctggcatgaccttttccatgtacatgacgtattgacggtacaacacccaggtctgggcactgaggcaaggcgttgcgtcgggtatgccgcgtacgagcaagtgcgggcttttttcgctcagcaacaggtgcgcggccagtgctgcggtggctgcgtcgagcccgttcaggctgctatcgatgttctggcgtacaaacggcacgtgttcgccccagaagtaatcggagtgccagtcgattaggttgatacgggtggggtatgcatcaggctccgggtccaggctcaggatcagggcggcgagtatcagcgcggtgcggctgcctcgctccgtacgttcacctgcatggccgccatgccagtgcagggcgttcgacaaagcctctgccagttgctgggccaagggtgtcgcgagcaggcggaccatgaggaaatccgcctccgccctgacatcggctatggacttgccggcgacgatgggctggccgaggtactcgaacagcggcacgtcctggtcagccatgaagcgctcgatgatgcgcacaatctgcgcacgctcgagcaccgacagtttccaggccgaaggctgtgaaccgtacagcggcttgagcgctcgccagtagtgcccctgacgcgccggcagcggttggctgaccgccaattgctgcaaggtcaggcgtgcctcatccaaggtctcggggcgttcaaggtgatacaggcgcagcgcctgagaaagcgtgaccttgaaacgactgcgcaggtacccaccggttttagccgcgagctgtttgaggggagggaccagggaggcaagctcgatattgctcatcaccggatcggtcaggtttttccaggtgccatccaggccattggcgcccacgctgccggtggcgctgagcagcacatggctgtcggggtcgatacgttgctgggtgcggatggtcaggaagtccgggtgatcggtcagcgtgttgagcgccgcgtaggcttttttaacggtcgcctggagggtgtccgggtcgacgttgctgccgatatcgagcgtgtcggcatcgctcaggttgccgccatcgatcactgtcgataacccagcgcgcagcgcgtggcgatcgttgagcaggccgacgtactgccgatagcgatacagttcgccgaatgagcgggcgctgttcaataccaccgggggcgcaggcgccggccagttgcgcaggcgctcgctcaggaagctgacctctgtcctgttcagcgggcgttcgatggcgtacgcctgtaaaaccccgacaatactgatgcgccggtcgggataaagatgactgcccagttgttcgcccagcgttccaagcctgtgccaccgcgcatcgggcacatcgggcgccagggtgttcatctccagcccgctgtcggggctcagcacgcacaacacttgccgctggtaatcgtagtaagtgggccgcggtgcgtcgtctgtggtgcccaggtcgtggtgatcgatgattgcccgcaacagatcggcggcctctttaaggtttctggccagccgcgagtccgactgcagatacagcgcagtgctgtagacgtcgaaagcgttaaagctgttctcgtccctgaccagttgttgcagggcgtcagccagttgcacgtagtcgcgcgcctgctggcccagttcggcgtagctcatcgacttgctgcgcccgttgtcatcaaacccgggaaaaccttgcaaggcctcgagttcttcgacaatggtctgcgcctggaggcggttcgcaggcattggcaagccatggaacgccagggtcaggttcaagggaaagctgcgcacgccggcaggaggtacaggtgcgatatacggcatgcccagctcggtcgggtccaggagttggctgatgtagatgatcgggttggccagtgtccaccaggcggacgagtcggccaggcaatagaccttgggttgcccgtgagccgtcacgctgagccgactgttgtgcacccgcagcgtagcgagatcaaacccttgggcgttggcccagtcgatgaaatctttctggttgatggctttgcaaaaggcttcgcaccactggcccaactgtgaatgctcgatcatggttacggggtgcgtgggaagcggcaacgcttggttcgaggcggtggccaataggcgggtcagttgcgcgatcaagggtgggtcgccctcgttgcgcagggtctggcgctcgctcaggtaggcgctggaggggctgacactgagtggcaggggcgtgtcgctgggcaggttgtcccaggtcagggcaagggcgtgaatgtcatccatgagggcggttccggctgatcaaaccccggatgatccgccccagggatggggcatctgtagcaggcgtttcctgcaaggccgtggcttgcgtcagccacggcggcaaggttcaggccggcgctcagaagtcccagcgtgtcgccaattgcaggctgcgcggctcgccatagaacccggtgccgaagttgcccagcccggtgtagtactttttgtcgaacaagttcttcacgttgagtgtggtgctcaagtgctcgttgaagcggtagcgcgccatcaggtcgaccaggtagtagctgtcctgggtgatgcgcgcgttgtggccgaagttgacggtgtcagtcggatcgggctgggacacgttgccgaagaattcactctgccagttcaccccaccgccgacggtgacgttctctagggcaccgggcaggcgataggtgctgaacaggcgcaccacctgctgcggtgtggtggtttgcagcaccgagctgtagacgtagtcgtccttggcatcacgggtgtgctggtaggtgtagccggcggagacgttccagccgtccagcacttcacccgacaactccgcttcaaagcccttggtggtggcgccggcgatggggcggtacaccgagtcggtctcgaagcccgagacgtattcggccacgttgtcctgctggatacggaacgcggcaaagctggcgttcaggcgcccgtcgtagaacgcagccttgagcccggcctcgtaggtttcgccctcgatcgggtcgagcagtttgcggtcggcgtccttgctggtttgcggacggtagatctgggtgtagctggtgtacaccgaccaggtgtcgttgaggtcatagacgatgccggcgtagggcgtgaccacgccgctctggtgataagtggtgcggttatcggccttggtcgggtcgtagaaatcggtggtgtcggtgccgctgaaggtgctgacgcgggtgccgaggatcaccgacaaatcatcggtgggcttcaggcgcgtggccaggtaggcgccggtctggcgctgcacgatatcgttctggccgctgcgcgggatgtccggcttggcgtactcgccgtgccagtcgaagatactgccgcccaccgctgggtagatcgagccgtacaccggcacgtcctgtttcgagcgggtggccatgaagcccatgatcagttcgtgttcacggccgagcaggctgaacggcccgctgaggttgacgtccagggtgttctgcacctgatcgcccttgtacttgcccatgaacatgtacatgttctggccgctgaccgggtccgggttgccgccgctggcggatgcgagcagggtgtcgtgctggctgcgcttgcggtcgaggctgactttgagtgaccagtcgttcgccagcttctgctgcaccgaggcgaacagcgtctggttctggaagtcgcggcggctccagtcggcggccgggttgaacgaacgcgaaaagttcgtgcgcgagccgtcgctgaaatacatcgggaatccggtccagctggcaccacgtgagcgggtgtcctgctggtcgatgccgaaggtcagcagggtgtcgggtgtgaggtcggcttcaaggatgccgtaggcgatgtccttggtgttctggtagtggtccaggtacgactggcgatcctggtacacaccgacaaaacgcccgcgcacattgcccgacgccgtcaaggggccggagatgtcgccttcggtgcggtagttgtcccaggagccgaaggtctgggtcaccgaagccttgaacgctgccgtgggttttttgcggatcaggttgaccgtggccgaggggtcgccggaaccgctcagcaggccggccgaacccttgatgatttccaggtggtcgtacaccgccatgtcggtgctggtggtgccgtagtcatacacgccgtcataggtggaattgacaccgtcgtactggaaattggtgatcggcaggccacggctggaaaactcccagcgctcgctgtcgtagttctgcacgctcacgccgggggcacggcgcagggtgtcagcgatgctgttggtgccctggtcgtccatttgctggcgggtgatcaccgtgaccgactgcggggtttcgcgcatcgacagcggcaggccggtggccgaggccatggagccggtggtgtacgaatgggtgtcttccgtggtggcgcccaggtcctggcccgaaatcgtcgtggcggccagctccagggcgccggtgttggtcgggatcagttccagtacgtagccgttgttgccttggggcagggcctgcaaaccgctgccctgcaacaggcgctgcaagccggccgccggggtgtagctgccattcaggccggggctggttttgccggcggccaggctgttgtggcccgcgatgaaaatacccgactgctcggcaaagctgttgagcacgctgaccagcgggccggcagcgatgtgatagctgcgtgaagcttcctgggtcgagggcgattcggcggcttgcagcgacggtgcgcccaggcaaaacagcgaggtggccagcgccagtgggcgcagcgcgaagcgggcaggttgcgacatggatgtttccctttggatcagatcgatcggcgaattgaaagcgtctgctgggttaaccgaacgaaggtgggaaaagggaactggtgctgagcgtttttttactttgggccgacagtgacccaccacggcatcggtttatccacgcgaatcggcagcgccgcctgcaacaaacccagggcgtggtcgctgtcttgcagcgggaatgaccccatcaccggcaagtgcgccacggctgggtcgcagcccaggtggccggggcgatagcgattcagttcggcgatcaattggccgagcggcaggttatccgccagcagcacgccccggctccaggcttcacgggccggggaggcgggcagggtcgggttgaaaccgttggcggtgaacgacacttgttggccggtttcgatgatgcgcacgtgctggtcgagggcggtgacttgcacccgcccttcgaacacgttgagctgggtgtggtgttcgccgtgcagcacactgaaacgtgtccccaacgcctgcaggcggccgtgtccggtgtccactaggaaaggccggagggcgtccttggcggtgtcgatcagcacttcgccaaagcgcaactgcaataaccgctgcaccgcatcaaagcgcacgtccacagcgctcaaggcgttcaaccacacatggctgccatcggccagcagggcgtcgcgcgtctcaccgctaccggtggcatagtccgcgcgccaaccgccgaccaaccggggcaggacggtgttgcgccaagcgccccaggccaatgtcgaccccccgcacagtaccagcagcgtcttgagggtttgccggcgcgagctgcgcaacgcccggctcgcgccatggggttgctccatcaagggcgcaaagcgctggctgacgcgttccacgtactgccatgcggccaagtgctcggggttctgcgcgacccaggtttgccagcgttgctgttcctgcgtacccgccgggtcctgcaggcgcacgtaccactgcgcggcctgttccaggctggcgtggctgagcttgccgggcgtgttcattgcaccaccatcccgtcgagctcggcttccaagatcgcgcagtgcagcagggcctgggccaggtatttcttgaccatgcgttcgcacacgcccaattgcaggccgatctgtttgtagggcaggccgtgcagttgagcgagcaggaaggcttcgcggacgttcctgggcaggcgagcgagcatggcgtccacttcgtagagggtttcgacgatgattgcccgttgctccggggacgggtgcgtgtcttccgggcgttgcgccagcgactccaaccaggctttttccagttggcgacggcgccagtggtcgatgcacaagccacgggcgatggtcgccaggtacgagcgctggcgcacgtgatcggtctcggccaccgggcggttgaggatgcggataaaggtgtcgtgggccaggtcggcggcatcccagcggtcgttcaggcgccggcgcaacaggccgagcagccagctgtggtgggtgccgtagaggtgggtgaaagaggtcgacacaatatccatccaacgcaaaaggattggcgtaaataagaattggtcgcgattaaagcaaagggagggggcgtgcgcaaatgatattggattgctattgggtgcaatcccctcccaggtttgaagggtgtcaggctggaaccaggaaagccgcctccagcagttgccgggtgtaggcatgttgcgggtcggcaaagatcgccttggcatccccttgttccaccacctgcccatgcttgaccaccatcaactggtgactcaacgccttcaccaccgccaggtcatggctgatgaacaggtaggtcaggttgtacttggcctgcaggctgcgcagcagttccaccacctggcgttgcaccgtgcggtcgagggccgaggtgggctcgtcgagcaggatcaggcgtggcttgagcaccagcgcgcgggcgatggcgatgcgttgccgttggccgccggagaactcatgggggtagcgatgccgggactccgggtccaggcccacttccttgagcgccgcgataatcgccgcttcctgttcggccggcgtgcccatcttgtggatgcgcaagccttcgccgacgatctcactgacgcacatacgcgggctcaggctgccgaacgggtcctggaacaccacctgcatttcccggcgcaacgggcgcacctgctgctggctgagcgtgtccagttgctggccttcaaaacgaatgccgcccttgctggcgatcaaccgcaggatcgccaggcccagggtggacttgcccgagccgctttcaccgacgatgcccagggtctgcccctgaggcaggctgaagttgataccgtccaccgccttgacgtagtcaaccgtattgcgcaaaaaacctttcttgatcgggaaccacactttcaggtcatcgacctccagtaacggtgggccaacctcgttggtcgccgggccgccgctgggttcggccgctaacaactcctgggtgtacgggtgctggggcgactggaacagcgtctcgcactccgcctgctcgacgatgcagcccttttgcatcacgcatacgcggtgggcaatccggcgcaccaggttaaggtcatggctgatcagcaacagcgccatgcccaggcgtgcctgcaattccttgagcaattccaggatcttcaattgcaccgtcacgtcgagtgcagtggtcggttcatcggcgatcagcaactccggctcattggccaaggccatggcaatcatcacccgctggcgctggccgccggacagttcatggggcagggccttgaggcgcttgtgcggctcgggaatacccaccaggtccagcagctccagggtgcgctgggtggcgaccttgccttgcagccccttgtgcaggcccagtacttcgttgatctgcttttcgatggtgtgcagcgggttcaaggaggtcatcggctcctggaagatcatcgcaatgcggttgccgcgtatgtggcggatggttttttctttcagggtcagcaggtcctgcccggcatactcgatggtgccagaggggtgacgtgccagcgggtagggcagcaggcgcaggatcgagtgagcggtcaccgatttgcccgagccgctttcacccaccagtgcgatggtttcaccgcgcttgatatcgaagctgacattgttcaccacgcggtggtggtgttcgcccgtgacgaactcgacggagaggtcgcggatttcgatcagattgtcctgattcatctcatttcctcgggtcgaaggcatcgcgagcggactcgccgataaacaccagcaaactcaacatgatcgccagcacggcaaaggcactcatgcccagccacggcgcttgcagattggatttgccctgggccaccagttcacccagcgacggcgaaccggcgggcaaaccgaagccgaggaagtccagagcggtcagcgtaccgatagcgccggtgaggatgaacggcatgaaggtcatggtcgacaccatcgcattgggcaaaatatggcggaacatgatcgcgccgttctgcatgcccagggccctggcggcgcgcacatattccaggttgcgcccgcgcaggaactcggcgcgtaccacgtccaccaggctcatccacgagaacagcagcatgatccccagcagccaccagaagttgggctgcacgaagctggcgaggatgatcaacaggtacagcaccggcaacccggaccagatctccaggaagcgctgcccggccaggtcgacccagccgccgtagaaaccctgcagcgccccggcgatcacgccgatgatcgagctgagcacggtgagggtcagggcgaacagcaccgacacgcggaagccgtagatgacccgcgccagcacatcgcggccctggtcatcggtgcccagcaggttgacactggaaggcggcgcgggggccggcaccttgaggtcgtagttgatgctctggtagctgaacgggatcggcgcccacaaggtccaggcgtccttggccttgagcagctcctggatgtacgggctcttgtagttggcctccagcgggaattcgccgccgaatgtggtctccgggtagcgcttgagcgccgggaagtaccagccaccgtcgtaatgcacggccaggggtttgtcgttggcgatcagctcggcgcccaggctcagcacgaacaggatcaggaacagccacagcgaccaccagccacgcttgttggccttgaaacgttcgaaccgacggcgattgaggggggacaggttcatctcaatgctcccggctggcaaagtcgatacgcggatcgaccagggtgtaggtgaggtcgccgatcagtttcacgatcagccccagcagggtgaagatgaacagcgtgccgaacaccaccgggtagtcgcggttgatcgccgcttcaaagctcatcaggcccaggccgtcgagggagaagatcacctccaccagcaacgaaccggtgaagaagatcccgatgaaggccgaggggaaaccggcgatcaccagcagcatcgcgttgcggaacacatggccgtagagcacacggtggttggtcaggcccttggcttttgcggtgaccacatactgtttgttgatctcgtcaaggaagctgttcttggtcagcagggtcatggtggcgaagttgccgatcaccagggccgtgatgggcagcgcgaggtgccagaagtaatcgaggatcttgccgccccagctcagctcatcgaagttgttagaggtgagcccacgcaacgggaaccagtccaggtaactgccgccggcaaacaccacgatcagcaggatcgcaaacaggaacgccgggatcgcgtagccgacgatgatcgccgagctggtccacacgtcgaaatggctgccatgccgcgtggccttggcaatccccagggggatcgacaccaggtacatgatcagcgtgctccataacccgagggaaatggacaccggcatcttttccttgatcagatcgatgaccttggcgtcgcggaagaagctgtcgccaaaatccaattgggcgtagttcttgaccatgatccacaggcgttcaggcgccgacttgtcgaagccgtacatcttctcgatttccttgatcagcgccgggtccaggccctgggcgccacggtagctgctggaaccggccaccgacacttcggcgccgccgccggcaatgcggctggtggcgccttcaaaaccttcaagcttggcgatcatctgctccacagggccaccgggggcagcctggatgatgacgaagttgatcagcaggatcccgaacagtgtggggatgatcagcaacaggcggcgaaagatataggccagcatttaatcgcctccactcgccggatcggcgctggtgttggtgtctgggatgacggccggtttgacgtcgggcttggcccaccaggtggcggtgccgacgtcgtagcgcggtgggaccttcgggtggcccaggtgatcccagtacgccacgcggaaggtcttgatgtgccagttggggatcacgtagtagccgaactgcaacacgcggtccagggccttggcatgcgccaccaggcttttgcgcgaatcggcgtcgatcagctcttccaccaactggtcgatggccgggtccttgaggcccatgtagttgcggctgccgggcttgtcagcgctggacgatttccagaactcgcgctgttcgttgcccggtgaagtggactgcgggaagctgcccaccagcatgtcgaagtcccgcgagcggatacggttgatgaactgcgacacgtcgacccggcggatcaccaggttgatgcccaggtcggccaggttgcgcttgaacggtagcaggatgcgttcgaactcggtctgggccagcaggaattcgatagtcaccggtttgccggtggtgtcgaccatcttgtcatcgacgatgcgccagccggcttcctgcagcagttggtaggcttcgcgctgctgggcgcggatcatgccgctgccgtcggtcctggagggttcgaaggcctgggtgaagacttcgggcgggatcttgtcgcgcaggggctcgagaatcgccagttcatccgggccgggcaggccggtggcggccatttccgagttttcgaaataactgcgcgttctggtataggcaccgttgaacagctgtttgttgctccactcgaaatccagcaacaggctgatggccttgcgcacgcgcacatcctggaacatcggtttgcgcatgttgaacacaaagccctgcatcccggtggggttgccgttggggatttcttccttgatcagccggccctgggcaacggcgggaatgttgtaggcattggcccagttcttcgcgctgaattccagccagtagtcgaactgcccagccttcaacgcctccagcgacacggtgctgtcgcggtagtagtcggtgatgcggttgtcgaagttgtagaaacccttagtgatgggcaggtccttggcccagtaatccttgacccgctcgtagcggatcatgcgcccggccttgacctcggcgaccttgtacggcccgctgcccagcggtacttccagattgcccttggcaaagtcgcgggtggcccaccagtgcttgggcaataccggcagttgcccgaggatcagcggcaattcacggttattggtgcgcttgaacttgaacagaaccttgagcgggtcttcggcgatcacttcgtcgacgtcggcgtaataggtgcggtagatcggcgagccttccttgatcagttcctggaaagtaaacaccacgtcctcggcgcggatcgggtggccatcatggaagcgcgcttccgggcgcaggtagaaacgtacccagctgttgtccggagctttttcgatcttgccggcgaccaggccgtattcggtgatgggctcgtccaggctttgcatggccagggtgtcgtagatcaggcccaggttgtcggccggtacacctttgctgatataggggttgaggctgtcgaagccgcccatggccgactcgcggaacgtgccacccttgggcgcgtccgggttgacgtagtcgaagtgcttgaagtcggcggggtatttcggcggttcgttgtacagcgtcaacgcatgttgcggggcggcgtgggccgcagtgcacagcagcaggctgccgagcagggcagtacgcaaagatatcattgggctttctccgaagctttcagccaccacgcgctcaggcccaggctgtagggcggcgtggtgacaaaggcgaaccggtcgcggtacgccaggcgatgatagttgaggtaccagttgggaatgctgtagtgctgccacagcagcacccggtcgagggcacggccggcggccagttgctcttcgcgggtcttggcggccagcagttgttccagcaggtgatcgacaatcgggttattgatgcctgcgtagttcttgctgcccttgatcgccgcctggctggagtggaagtactgccactgctcaaggcccgggctcaaggtctggttgagggtgatcaggatcatgtcgaagtcgaattgatccaggcgctgcttgtattgggcgcggtcgacggtgcgcaggcgcgcgtcgatgccgatgctgatcaggttctcgacatagggctgcaggatgcgctccaggttcgggttgaccagcaggatctcgaagcgtagcggctggccatccttgttcaccaggcgctgcccggacagcttccagccggcctcgccaagcagggccagcgcgcggcgcatggtttcgcgggggatgccgcgcccgtcggtctggggcaggctgaaggcttgcgtgaacaggttggccggcagttgctcgcggtacggcgaaagcatcagccattcatggccggtgggcacgccggtggcggcgaattcgctattggggtagtagctcaaggtgcgcttgtacgcactgctgaacagggtgcggttggtccactcgaagtcgaacatcagccccagggcttcacgcactttggtctggctgaaggtgggccgccgcgtgttcatgaacaggccctggctctgggtcgggatctggtgggcgatctgcgccttgatcacgtcaccccggttcaccgccgggaagttgtagccattggcccagttcttggcctggtgctcgatgtagatatcgaactcaccggccttgaaggcttcgaaggccacatcgctgtcgcggtagaactccacctcgaccttgtcgtagttatagaagccctggttcaccggcaggtccttgccccagtaatccttgacccgttcgaacatcagttgccgcccgggcgtgaccttgctgatgcggtaggggccgctgcccaggggcggttcgaaggtggtggccttgaagtcgcggtttttccagtagtgctggggcaataccggcaattcgcccaggcgcaggatcagcaaggggttgccggcacgcttgaacacaaagcggatgcggtgtcggttgagcacatccacccgcgccacttcctgcaggttggtgcggtattgcgggtgcccttcggtcagcaaggtgcgataggaaaacgccacgtcatacgcagtgatcggcttgccatcgtggaagcgcgcttccgggcgcaggttgaacaccacccagctgcggtcctcgctgtactccaccgattgggcgatcagcccatagctggaggtgggttcatcgccggagggcgcgtacaggccggtgccaaccatcaatggctcattcagctcattgacgccatattgcaggaagttcggcgtggacaccgggctggagcccttgaaggtataggggttgagggtgtcgaaagtgccaaaggccatgacccgcaaagtcccgcctttcggcgctgcagggtttacccaatcgaagtgggtgaatttggccgggtacttgaggctgccgaactgcgcataaccgtggctctcggtaatcgtcgcgttcgctgcaaagctcaaggccagacttattagtagaaggaggggacgcttcaagtcagagatccgatccaggcggcttgggctttatgatcggtacagtaacagcttgttccggttggaaaaagccagtcggctgatgcagggccaatgtgggagggggcttgcccccgatagcggtatacctgccgatgaatctgttggctggtacattgctatcgggggcaagccccctcccacatggattccccagttttcttgaaccttagcgtggacctgataccaccagcatctgcccaggcttcagggcctggccggtacgcgggttccagcgcttgaggtgttgcatctcgacattgaagcgcttggcgacgatgtacaacgagtcgcctttcttgaccttgtattgcaccggcttcttgctgtcggccttggccaccagcttgcgcgtgtcctgcatcaccagggtctggccgaccttgagcgcctggccgttgagcttgttccagcgctgcaggtcatgcacgtcgaccttgttggccttggcgatcagcgtcaggttgtcgccggtgcgtaccttgtagctgcgggtacgcccggccacccgtgcggtctcgacttcgtcgaacacctgctttttaggacgcatcgccagcaattcttcaggcttcatcgtcgaaagcgtgctggtcagcaattgcgccttggaactgggcaccagcaaatgctgcgggccatccagggtggtgcgttgtttcagcgccgggttgagctggaacagttcgtcttcgtcgatctcggccagcgcggcaacccgggacaggtccatgctctgcttgacttccaccacttcgaagtacggctggttggcaatcgggttcaggttgacgccataggcctcgggtgccagcaccacttgggacagcgccaggaacttgggcacgtagtccttggtttcctggggcagcggcaggttccagtagtcggtcggcaggccgagcttctcgttgcgctcgatggctcggctcaccgtgccttcgccggcgttataggcggccagggccagcagccagtcgccgttgaacatgtcatgcaggcgggtcaggtagtcgagggcggcggtggtggaggcggtgatgtcgcgacggccatcgtaggcgcgggtctggcgcaggttgaaatagcgcccggtggaggggatgaactgccacaggccgaccgcatcgctgcgcgaataggccatcgggttgtaggcactttcaatcactggcagcagcgccagctccaggggcatgttgcgttcttcaaggcgttcgacgatgtagtgaatgtagaggctgccgcgttctccggcgttctccaggaaggacgggttgctggcgaaccacaggcgctgttgctcgatacgcgggttgacgcctaacccgtcctgcagctgaaagccccggcgcatgcgttcccaaacatcctggggcacatcgggcgtcggtttttctgaaagccagatgacgggtttctgtttgattttggcggtaaggtttggcttgggttgcacggtggattgtgcggtgaaattgcttgattggcagcccgccagtgtggcggacacagccaccgccacagcttgagccaggcgggtcaatgcgtctgaatggttggatttacgaatagatgacgacattggctggaagtaagttccgggcaaaaatgtcgggcgattctagaaacccgctgggttccggtcaaccattcagaaattacgtatcagattgcttcccgttagaacttatctttccaggccctcaagctagcaaacacctcggccccagagcggttgtcgcggccgttccgttcgtccgctttttgtttaacggatgtttcagaggtgcgtagaaatgggttggtcagcttttccagggccaggttggaaggcagcgtgatctcgcccctggcgcgcagttggcgtacgttttccactcgttcggctatatctgtgttatccggttccacagcctgggcgaacttgaggttactctgtgtgtattcgtgggtgcagtacaccaaggtttcggcgggcagggcggccaggcgttcgagggaggtgtgcatctgttccggcgtgccttcgaacaggcgcccgcaaccggcggcgaacagggtgtcgccacacaacagcacgcctggatgataaaaggcgatatggcccagggtgtggccgggcacgctataaatgtcgaagtcccagccgagtaccgtgatgcgctcgttatcgtgcaacgccacgtcccgcgccgggatcctctcgttggccgggccgtagaccttggcgtcggtctcacgcttgagctgttcgacaccgccgacgtgatcgtggtgatggtgggtgatcaggatgtcgctgaggctccagccagggttctgctcgagccaggccagcaccggcgcggcatcgccggggtcgactacggcgcagcgttgggtgcgagggtcctgtaacaaccagatgtagttatcggtgaaggcgggcagggcactgatctgtatcattcttcgattcgccaagctgaacacattggtgcatcttagaacgtctaggcgagttggagaatgcaatgactgataaagcgttcgcccaggccgatcctgagtggctggccctgatcggcgcggcccgcgagtggctgtccggtcccatcgggcaatttctgctggacgaagaacggcgcatgctcgaagacgagctgggccggttctttggtggctatctggtgcactacggcccctcggccgaaacgccgccctgcgcgccgcaggtgcaacgtaatgttcgcttgggggcaccgttgcctggcgtggagattgtgtgcgaggaacaggcctggccgttgagcgaacatgctgccgatgtggtggtgttgcagcacgggctggatttctgcctgtcgccccatggcttgctgcgcgaggcggcgagcagcgtacggcccggtggccatttgctgatcgtggggatcaacccctggagcagttggggcctgcgccatgtgtttgcccatgatggcctgcgccaggcgcgctgcatctcgccgcaacgggtgggcgactggctgaacctgctgggcttcgcgctggagaaacgccgcttcgggtgctatcgtccgccgctcgcgtcgaccaagtggcagggccgcctggccggctgggagcgccgggccggcgcctggcaattgtccggtggcggcttttatctgctggtggcgcgcaagatcgtggtcgggctgcgccccgtgcaacaggtgcggcgtgagccgatgggcaagttggtgccattgccgatggccaaggtcaaccgcaagcaaagcgaagcgtaaccctctttttgaattgataccgagcaaccgatgaccgatagcgtagaactcttcaccgatggcgcctgcaagggcaacccgggccccggcggctggggcgcgttgctggtgtgcaaaggtgtggagaaggagttgtggggcggtgaggccaacactaccaacaaccgcatggagctgatgggcgccattcgtggcctggaagaactcaagcgccgctgcaatgtgctgctggtgaccgactcgcaatacgtgatgaagggcatcaacgagtggatggtcaactggaagaagcgcgggtggaagaccgctgccaaggaaccggtgaaaaacgccgatttgtggcaactgctcgatgagcaatgcaatcgccatgacatcacctggaagtgggtgcgcggccatatcggccaccccggcaacgaacgtgccgaccagttggccaaccgtggcgtggacgaagtgcggggctacaagcagagctgatgctgactcacgtgttaacattgcgccctttgactcacaccacaccgttgagagctgaaccctgatggccatccgatctgttgtactcgataccgaaaccaccggcatgccggtgactgacggccaccggatcattgaaatcggctgtgtcgaattgatggggcgtcgcctgacgggtcgtcacttccacgtctacctgcaaccggatcgtgacagtgacgagggcgcgatcggcgtccacggtatcactgacgaattcctcaagggcaagccgcgttttgccgaagtcgccgatgagtttttcgaattcatcaacggcgcccagctgattatccataacgcagcgtttgacgttggcttcatcaataacgagtttgccctgatggggcagaccgatcgcgcggacatttcccagcactgctcgatcctcgataccttgatgatggcccgtgagcgccacccgggtcagcgcaacagcctcgacgccttgtgcaaacgctacggcgtcgacaactccggtcgtgaactccacggcgccttgctcgactccgagattctcgccgacgtctacctgaccatgaccggtgggcagaccagcctgtccctggcgggcaacgcctccgatggcagcggctcggcggaaggctccggcaaccgtccttcggaaatccgccgtttgccggctgatcgcaagcccaccaccatcatccgtgcgagtgagcaggatatggctgaacatgcggcgcgactggaggcgatcgccaagtcggcgggcgcgccggcgttgtggacccagctgacccagcaataacccctggctggactcgattaaaaatgtgggagggggcaagccccctcccacaattgatttcaattgcctgtaaatcttcattcgcgtcatggtcccccagcttctacccttgagtgcatagccctcaggacgacaagcactcatgtacaaagacctgaagttccccgtcctgatcgtgcaccgcgacatcaaggccgacaccgttgccggtgaccgggtccgaggcatcgcccgggagttggaacaagagggcttcagtattttctctgcagtggactacgccgaaggcaggctggtggcgtcgacccatcatggcctggcgtgcatgctgatcgccgccgaaggcgctggcgaaaacacccacctgctgcagaacatggtcgagctgatccgcctggcgcggctgcgggcgcccaacctgccgatctttgctttgggtgagcaagtcaccctggaaaacgcgcccgccgacgccatgagcgaactcaaccagttgcgcggcatcttgtatctgttcgaagacaccgtgccgtttctcgcccggcaagtcgcccgtgcggcccgcacgtacctggatggcctgttgccgccgttcttcaaggcgctggtgcagcacacggcggattcgaactattcctggcacacgcctggccatggcggcggcgtcgcctatcgcaagagcccagtggggcaggcgtttcatcaattctttggggaaaataccctgcgctcggacttgtcggtctcggtgcccgagctgggttcgctgctggatcacaccgggccgctggccgaagctgaagcgcgcgccgcgcgcaactttggcgccgaccacaccttcttcgtgatcaacggcacctccaccgccaacaaaatcgtctggcattccatggttgggcgcgatgacctggtgctggtggaccgtaattgtcacaagtcggtgctgcattcgatcatcatgaccggcgccatcccgttgtacctgtgcccggagcgcaatgaactggggatcatcggcccgattcccctgagcgagttcagccccgagtcgatccgcgccaagatcgacgccagccccttgacccgtggccacccgccgaaagtgaagatggcggtggtcaccaattccacctacgacggcctgtgctacaacgccgagctgatcaaacagcaattgggcaacagcgtcgaggtgctgcattttgatgaggcctggtacgcctacgcggcgtttcatgagttcttcgccgggcgctacggcatgggtacctcgcgcacgccggacagcccgctggtgtttaccactcactccacccacaaactgctggccgctttcagccaggcttcgatgatccacgtgcaggatggcggcgcacgtcaactcgaccgtgaccgtttcaacgaagccttcatgatgcatatctccacgtcgccgcaatacagcatcattgcctccctggacgtggcctcggcgatgatggaaggcccggccggacgctcgctgttgcaggagatgttcgacgaagccctgagcttccgccgcgccctggccaacctgcgccagcatatcgccgccgaggactggtggttttccatctggcagccaccgtcggtggcggggatcgacaaggtcgccaccgctgattggttattgcacccccaggatgactggcatggcttcggtgatgtagccgaagactacgtgctgctggacccgatcaaggtgacgctggtaatgcctggtctcaatgccggcggggccttgagcgattgcgggatcccggcggcggtggtgagcaaattcctctgggaacgcggcctggtggtggaaaagaccgggttgtattccttccttgtactgttctcgatgggcattaccaaaggtaaatggagtaccttgctcaccgaattgctggaattcaagcgcagctacgacgccaatatcagcctggccagttgtttgccatcggtgtttgcccaagggccgacgcgctaccaaagcatgggcttgcgcgacctgtgtgatcaattgcacagctgttatcgcagcaacgccacggccaagcatctgaagcgcatgtacaccgtattgccggaaatcgcgattaagcccgccgacgcctacgaccaattggtgaggggcgaagtggaggcggtttccatcgacgccttgccaggacgcatcgcagccgtgatgctggtgccttatccgcccggtattccattgatcatgccgggcgagcgctttaccgagtcgacgcgctcgatcatcgactacctggcgtttgcccggacgttcgatagcagtttccccggttttgtcgctgatgttcatgggttgcaacacgaagatgacggcagtggtcgttgttacaccgtcgattgcatcaagggttgaggatggttatgcaagctgtaatgaacccgaagtatccggggctcagtgtacgggtcgccgacgagggctttgatgcctacgtgtggggtaatgacttcagctttgaagtcagcgcctacggtgagccgcaaatgggcaagcgggtcgaccagtggcccgtggagcgtatcttgccgtaccgcaagtgctacggcattgaccctgaggagttcgccagtttccgtgacgcgcccgacagtgcgatcttcatggcttacctggacgaccgcgcggtggggcacatcgtggtcagcaccaattggaacggctttgcccatgtcgacgagttggcggtggccctgcctgcgcgacgccatggggtggccaaggcgctgctagatgtggcgcagttctggagccgcaagaaaagcctgcccggcatgatgctcgaaacccagaacaacaacctcggtgcctgccgcttgtacgagcgttgcggctatgtgatgggcggcatcgaccatctgcgctatcgcggtatcgacccgcagacccgcgaagtggcgatattctggtatcggttgttcaaaagcgaagccgacaacgcttaacccgccagcaaaccctcggccttctgcgtcacgatctccagcaacgcattcaacgccggggaggtcgggccatccttgagcgtcagcgcatacaggctgaccatgatcggcggcgacaccgggcacgcatccagcccggcctcgcgtgcgccgaacgcggtgaacgggtcgaccaccgccaggccttcgcctgcttccaccatgctgcgcatcatctggtaggtctgcacccgcgtctgcactaccggcagcgggcgcaaggcttgcagcttggcgtccagcaggcggctgagcgggtcctggccctccaggccgatcatcgactgcccggcgaggtcctgcagcgcaatgtacttctgcttgggtttcagccagccatggggcgccagcagttgcagcttgccctgggcgagtacggtgcagtggatctgcgggtgttccgggtcatgcaggctcaagcccacatcggcttcgtgcagcagcaggctcctgacgatctcgcgggtgggctggctcgacaggttgcagggcgtgtcctggaagcggcggcgcaataccgcaatgctttgcggcaacagctgattggccaggggcggtgtgcagagcacgcgcagggtaggggcatgatggtttttcaggcggctggccaggcgttgcaccggctccagggcctcatacacatgggcaatttccgcctgcagttccagggtttcccgggtggcctgcaagcgcccgcgtacgctggcgaacagcatgaagcccaattgctgctcggcgtccttgagcgccgcgtccacctcgcccacggaaagttgcaaccattcggcggccgtgccgaggtgtccggtctgcaagatggcctgaatcacttcgatatgacgtaaacgcatcgccggagtctatgtgcagcgggccgggtattcaatagaatggctgcgctgatcattaacgaccaaagccggctgccggcattaacaacaaaaacaggtctggtctcacatgcctctaccctcgatattcctcggggtaacggtcaagcaactgctggtcctggtgaccgtagggtgcgtggctgcttatctcttcaacagtcaaaacgataccgcgccggagaacctggcacttgaagcgtttatccgttcccaggaacaggtcgtcgaacaggtgggagcggtgctgggtattgaactggtcaggcaggtggtggcgcatccaggctacaacacggcaggctaccagcgttccatgttcgcggtggagggtgagcgggggagattggtggtgaccgtgaagaaggtcgagggcgagcagggcattgaagtgacggagatccgccgtccgtgatcaccccagcccagtcaacgccgtcaatggccaggactgagcaggtggataaggcgggatcttatgacgcgagggtggtttgcgattcgcgcacgagaatggtgcccgactggatcagcttgaattcgtcgccttccagtttctctacacggtcgccaatggccagcttgtaggtaatggtaggtgccgagccagccaggtcgccttgcgccgggttggattcctggaactcatgcaccgaatacacgcgtccttctgcgtctctggcatgaaactgtccgactaatactgctgccatctgtttagaacctctggagataaacactcgatttgcggttctgtagaccgtcatggagcggggtagtttacttacggaataaaaatactattcgccgacgttttcagatgcttcctacatagtgttgcgcagtgcaaacaaccgcaggattatcaaaaccttctggtgaaccggtcgcgaagactctataactacaagctccttttagtcagacgtcgggaaaccccaatgagcaaggtctacaccgtcgccgtcgtggtcggcagcttgagaaaagactctatcaaccgcaaggtcgcgctcgcattggccgaactggcccctgccaacctgaagttgaacattgtggaaattggcgatttgccgctctacaacgaagacattgacggagcatcaccgccggcagcctacagtactttccgcaaacaggtgagctcatccgacgcggtgttgttcgtgaccccggaatacaaccgctccgtcccggccccgttgaagaatgccattgacgtgggttcccggccctacgggcagagcgcctggagtggcaagcctggcgcgatcatcagcgtatcgccgggtgcgattggcgggttcggcgccaaccatcacctgcgccagtccctggtgttcctcgatgtgccgtgcatgcagcagccggaggcttacctgggtggggcgggcgccgtgtttgatgaggggggcaaggtctccgagaaaaccaagccgttcctgcaggccttcattgacgcctatagcaagtgggtggccaaacagcacggttgattacaaggaggcccggccgcaatggccgggcttttttgcgggtcaggccagttgatctgccaacaacagagcgagcgccgtgttgttgaggcgtgatgcctgatcgacctccggccccaggatggtcttttccacgtacaacgaatgcacgtccgtcaccccgataaagcccagccaggcgtccatatagggcttctggaaatccatcgcctgggcgtccggcgccgaaaaatccataccccgcgcgtacacattcaccgctgtcttgttgcgcaataacccgcgcaggccgtgctccgggctgaactcgaacagcacatctttctgcgacaccacatcgataaagtgcttgagcttgtaaggcaccgcgaaattccacagcggcaccgagaacaccagcacgtcagcctgatgcagctgggcggcgagtgttttgagtgcagaccaggcgatggcttgttcctcagtcaacggcgtaccgctgagcccggcgtacttggcgtccatcaccgggccgtcgaattcgggcagctccaatgcccacagatccagcgtattcacttgggtgtccggcgcgttttgttgatagcgggcaataaactggcgagcgatttccaatgatgcggagcgttgtttgcgcggtgagcattcgatgtgcaggagcgtagtcatggcaggcctcggataaagatgacccgagcattgcaacatagcgttgattgaaatataaatcgtgttttactagctcattgattgcgtatcaaaatatgttcgatagcgtattgctcaaaaccttcgtctgcgtcgtggatgagggcggcttcagtcgcgccgccgagcgtttgcacctcacgcaatcggcggtcagcgggcacttgcggcgcctggaggaacaggtgggcaagccattgctcacgcgcaccacgcgttctcaacagctgacagcggacggcgaacgcctgatggcgtatgcgcggggcatcctggcgttgaatcgtaatgcctgggccgagctgacgcgctcggcgttccagggaaacctgcgcgtaggcgtgtcggaagagtttgcgcaggcacgcctgttgcgcgagttgcaggaagtcgccgcgcactatcccggtatgcaaatcactgtacaggtcggcattcccggttcgctgctggcgttgatgaagcagggcgaactggatgtggtggtgggatcgttgtgtgaatccagcgagcccggcctggcgttgtggcaggaaccgctggtgtgggcctggtccgccagccgatgacgacattgcctgcgcccttgcccctggcgttgtttcccgaaccatgcccttaccgcgaagcggcgctgtcacgcctggcccaggccggcatcgcccagcgcaccgccatgctctgtacgagctacgccgcgctgcatgccgctgcattggccgggtttgccatcgcccccatcgcccgtagccaactggtgcccggcttgaccgtgctcggcgccgaacacggtttacccgcgctgcccgatgccgaattccgcctgttcagtgcgccggacgccgaccctcgcctggtcgaggtgatcacccaggtagtggtccgctacggcgcttccttgcgctagcgcggctcagcgcagccagttggtgcgggccagttcgatgacttcatcgccgcggccgctcatcaccgccttgagcatgtacaggctgaaccccttggcctgttccagcttgatggtcggcggcatcaccagttcctgagtggcggtgaccacatccaccagtaccgggccgtcatgggccagggcgcggcgcagggccggttccaggtcctcggattgctccacgcggatgccgaggatacccatggcattggacatggcggcgaagtccgggtttttcagctcggtgccggcgtccaggtagcccgccgccttcatttccatggcgacaaagcccagggacgagttatcgaacacgatgactttgactggcaagttcagctgcgccagcgagatgaagtcgcccatcagcatggcgaaaccaccgtcacccgacatcgagatcacctggcggcccgggaatgctgcctgcgcgccaatggcctggggcatggcgttggccatcgagccatggttgaacgaaccgatcaggcggcgcttgccattcatcttcaaatagcgtgcagcccacacggtgggggagccgacgtcagcagtgaagatcgcgtcgtcatccgccaactcgctgagcaagcgtgccacgtattgcggatggatcggtcgattggcctttgacggctgagccaggtcatccagcccttggcgggctttttcataatgcttcaaggacgtgtcgagaaagctgcgatcggtcttgcgcgttaaccgtggcagcagcgcactgatggtttcgctgacgtcagcggcgatgcccaagtccagcgtggcacggcgaccgagcgcttgggggttgcggtcgacctggatgatcttggcgtcggtggggtaaaactggcggtaagggaaatcggtgccgagcatgatcagcgtgtcgcagtcgagcatggcgtgataaccggagctgaaaccgatcaggccggtcatgcctacgtcgaacgggttatcccactccacatgctccttgccacgcagggcgtgcaccacgggagcgcccagtgcgtcggcgagggcgaccacttgatcatgggtgccggcgcacccgctgccgcacagcagggtaaccttgcggctgctttccaggatatcggtgaggcgttgcaggtcctgttccgccggcagtgtgcgcggtgcatgcagggcgggccacggcttgagtttgtcctcgacctccagcagcgatacatcgcccggtattaccaccacggccacgccgcgattgaggatcgccgagcgcatggcgcgatgcagcacctggggcatctgttcggggttggtgaccagttcgataaagtggctgcactccttgaacagttcttgcggatgggtttcctggaagtagttcaggccaatctctgaggatggaatttgtgcggcaatcgccagtaccggcacatggttgcgatggcaatcgaacagcccgttgatcaaatgcaggttgcccggcccgcaactgccggcgcacaccgtcagctcgccagtagccgccgcttcggcaccggcagcaaaagccgccacttcctcgtgacgcacgtgcatccactcgatgctgtccatggtgcgcagcgcgtcggtgaggccgttgaggctgtcgccggtcaggccccagatgcgcttgatgcccgcctgttcaagggtggtcgccaactgttgggccaggttgattttcgccatgaagaactccaatcgtcagtgaggttaaaaactgctgatcaataggggacagttcgatcacggcgaatgctccgcctttaatgtgaagattgcgtcatggctgcacggtattgccgggtgcgtcgggccagaaaccattggtcacgcaccagcgccatgcagggcgcgacgttggtcttgggcaaatggccgcggctgaggcggcgcatctggtagcgcaccacggcgagaatggccagggaggccaggggcttgcgcttccagtcgatgggtttgagttgcgggttggggtcgcggccttcgcgccagtgctggatcagttgtggctccagcgtcagggcggtggcgataccggccatggcgatgccgctgtcgagcacttgttgcacgatgggcaggcgacggatgccgccggtgaccattactggcatctgggcaatggccgcgacttcgctggcgaattcaagaaaatacgcctcacgggccagggtccggccgtcgcgtgcttcgccttgcatggccggtgcttcatagctgccgccggacaattccagcaggtcgatggacagcggattgagcatctcgaccacggcgcgtgcatccgcttcttcgaacccaccacgctggaaatcagcggagttgagtttgaccgacacacaaaacgacgggctgacacaggcacgcaccgcacggatcacgtccagtagcaggcgtgcacggttctccagtgaaccgccccagcgatccgtacgttggttgctcaatggcgacaggaactggctaagcaagtagccatgcgcaccgtggatctgcacgccggtgaagccggctttttcggccaggcgtgcgctggtggcgaagcgctggatcacgtcctggatgtcggcctcggtcatggccttgggcgtggcaaacatcttcgagaaaccgcccaggtcgagcgccacggcggacggtgcaatggcctgctggcgcaggttggcgggtgtctggcgtcctgggtggctgagttgcacccagaagtgcacgttcttgcgccgcgccacgtctgcccattcgcgaaagcgctgcagttgctgctcgtcctcaagggcgacgccgccggggccggtcatggcgcggcggtcgaccatcacgttgccgctgatcaacaggcccggctcgccatcggcccaggccgcgtagagctgcatcaactcaggggacggcgcttgccgggcatccgccatgttctcttccatcgccgccttggcgatacggttggaaaggacttggccattgggcagttgcagggcttcaaagggtgacatgggttgactcctgagcgggggaggcctcaggctaagcttaaaggtaactttaaggtcaagcaggcattcgatgaatattggcgaactggcaaaacagagtgggctggcggcgtcgcgtatccggttctatgagtcgcaaggcctgatcagtcaggtcgggcgccaggccaacggctatcgacgctatgcaccggaagcactgcagaccctgcaactgatccagagcgcgcagcaggccgggttcaccttgcaggagctcaaggcgctgatgcccgcgccaggggagcacaagcgtgaggagctgatcgaagcactggaacgcaaggtgatgcagatcgaagaaatgcaggcacaactggcccacagcaaggcgcaactactgggtgtgctcgaggcggtgcgagcgcagccggaaggggtgccgtgttcgatggggcagaagcaggtgctggcgtcgatcaagaccgatgatctacagagcaagtagatgccaatgtgggagggggcttgcccccgatagcagagggccagtcaacagattcattgactgatccaccgccatcgggggcaagccccctcccacatttgaggctcagcgccggcggaacaacggcagtggctcatccgttgccgcctggtacgtcaccgagaagtcctggagactttccagtgcttcgtacgggtctttgtccgcgcgcagggcgaaagcatcgaagccgcagcggcgcaggtagaacagctggtcgcgcagcacgtcgccgatcgcacgcaactcacccttgtaaccgtagcggtcacgcagcaggcgcgcgttggagtagttgcgaccgtcggtgaaggccgggaagttcagggcgatgacctggaagtgctccacgtcatcaccgatttcctcggcttcttcatcggcgtccagccacacgcccaggccgccgtcgcgggccttgagggcatggccgtgttcgcgccacagggccaacggcacgatcaggtcgtcgcagttggagatgccgtcgaagctcgcgtccttgggcagcaggtgccaggtttcgtcgaggacttcgttgttcttaatgattcgctgcatagacgcgctccttgaacaggtcgatgccgatgcgctggtaggtgtcgatgaaacgctcatcttcggtgcgctgttcgatgtacacgtcgatcagcttgccgatcacctcgggcatggcttcctgggcgaaggatgggccgaggatcttgcccaagctcgcatcgcggctggcgctgccacccagggacacttggtagaattcttcgcctttcttgtccacgcccaggatgccgatgtggccgacgtggtggtgaccacaggcgttcatgcaaccggagatgttcaggtccagctcgccgatgtcgaacaggtagtccaagtcgtcgaaacggcgctggatcgattcggcgatcgggatcgacttggcgttggccagggagcagaaatcgccgcccgggcagcagatgatgtcggtcaacaggccgatgttcggcgtggcgaaaccaccttcgcgcagctcgccccacagggtgaacaactggctctgctcaacgtccgcgagaatgatgttctgctcgtgggaggtgcgcagttggccgaagctgtagcgctcggccaggtcggcgacggcgtccagctgcttgtcggtgatatcgcccggcgcgacgccggtaggtttcaacgacagggtcaccgccacatagcccggcttcttgtgcgccagggtattgcgcacacgccagcgggcaaaacctggatgttctttgtccagtgctgcgagctcggcgtcctgattgctcagagccttgtactctgggtcgacgaagtgcttggctacgcggtgcacttcggcttcggtcagggtcgtctggccaccgcgcaggtgttccatctcggcgtcgactttctgggcgaagacttcaggggtcagggccttgaccaggatcttgatccgggccttgtacttgttgtcgcgccggccgtagcggttgtagacccgcaggatcgcgtcgaggtagctcaacaggtcctgccacggcaggaactcattgataaaggcgccgaccaccggggtacggcccaggccgccacccaccaggacacggaagcccagctcgcctgccgcgttgtgcaccggctccaggccgatatcgtgcacttcgatggccgcacggtccgaggtcgagccattgatggcgatcttgaacttgcgcggcaggtaggcgaattcggggtggaaggtggtccactgacggacgatttcacaccacgggcgtgggtcgatcagctcgtcggcggccaccccggcgaattggtcggtggtcacgttgcgcaggcagttaccactggtctgaatggcgtgcatctgcacggtagccagttcagccaggatgtccggcacgtcttccagcgccggccagttgaactgtacgttctggcgggtactgatgtgggcgtagcctttgtcgaagtcacgggcaatcttggccatcatgcgcgtctggcgcgatgtcagctggccgtagggcacggccacccgcagcatcggcgcaaagcgctgaacataaaggccattttgcaggcgcagagggcggaactcttcttcgctcagttcacctgccagatagcgtcgggtctgatcacggaactgcttgacgcggtcctcgatgatgcgctgatcgtattcgtcgtatacgtacatataggtcctgttctcggcaaatctgcgcgcacggccgcgcactcccaacggagccggcgcacgataccagtttgcgtttatgcgcaaaagtgatgtttgagtatatgcaaataaccaaattgactaatgagaaccgttatcgccatacccacatttgtcatgcgggcaatcgtcgactttactgtgagcgtgtttgagcgtattcaccgataaaaccgataagaggcgatgcgatgagcaatccgacaaaagcccgtaagcccgacagtaccgtggacgcctgggccattctgtttctgatcatcctggtggtgggaaccgccgtattctgggtgagccaccagtaaagagcctcgattgactgccgtgttgccactatcatggcggtcactattccaggctcgaaaaaccatgtcgaaggtgctgattgcgtgtgtgtggttgctgggaacggcgtatggggccatggcccatgccacgtcggtggtgtttctcaacccgggcatgtcgacggaaaccttctgggtcagctacgcgcaattcatgcaggccggtgccaaggacctcggcctgcatttgcgtgtgcgctattcagagcgggatgccaacaacacgctgatgcaggcgcgtgaggcattgcacggcagcgagcgaccggattatctggtgctggtgaacgagcaatacgtcgccccgcagatcctgcgcatggcccagggcagcggcgtgaagctgctgattgtgaacaacgcgctgaccgccgatcaggtgcgcttgcttggcaatggcgacggttgggttgccagcatggtcgctgatgatgaacaggccggctacctgatgctcaccgatctactacgccagcacggtaccgttgctgctggccaatccatcgaactgctggcgttctccggcaccaagaccaccccggctgcgcagttgcgcgaacagggcctgcgccgcgccttggccgaacaccccgaggtgcgcctgcgccagttggtctacggcgaatggagccgccagcgcgcctacgaacaagccacgctgctgttcaagcgctacccgcaggctgcgctggtgtggtcggccaacgatgagatggcgctgggggccatgcgggcattgcaggacagcgggcgtgtgccgggcagggatgtgttgttcggtgcggcgaacagctcgccggatatcctgcgggcgcggcttgacggtcgcttgagtacgctggtcgcggggcatttcaccctgggcggttgggcgatggtattgatcaacgatgatgcccagggtgtggatatcgacgcccatggcgggcgtgaccggcaggaggcgttattccaactgatcgatacgacccaggcacaacgcctgctcggccccatggcgccggtggatttccgcgcactgtcagccgtcggcaagccggcgtcctaccgatacccctttagcttgcaactgctgctgcgctagacgcccgccaggtgcagcaccagcttgacgataccgaacagcgtcaacgcaaacacagccgtgaacagaatgcccagcaccacaaaatggctgggcttgccgtgggtgaagtcgcgggcgcggttcttgccgctctgcacgccaaacgcggccgccaccacgctgtgcagcatctgccagaaggtagggggcttgttgttgactggatcgtccatacatccctcgacacaaggtgtgtgagggagagcatagacaatccagcggggcttagttgtcgtaacccaggttcggcgccaaccagcgctcggtcacgctcaggtcctggcctttacgcgccgtgtagctggtcacctggtccttgtcgaccttgcccacggcaaagtactgcgcctgcgggtgggcgaagtaccagccgctcaccgcagccgccgggaacatcgcgtagtgttcggtgaggaacacgccgctgcgaccggcctgcatctcgcgggcctcggggtcgagcagttggaacagttgggccttttcggtgtgatccgggcacgccgggtagccgggggcagggcggatgccgctgtattgctccttgatcagcgcctcgttgtccagttgctcgtccttggcataaccccagtgctctttacgcacctgctggtgcagccattcggcgcaagcctcggccaggcggtcggccagggccttgaccatgatcgagttgtagtcgtctcccgcgtcttgatacgccttggcgacttcttcggcgccgatgccggcggtggtgatgaagccaccgatgtagtcggtcacgccgctgtccttgggcgccacgaagtcggccagggagaagttcggcttgccgtcggtcttgatgatctgctggcgcaggtggtgcaaccgggcaatcggctggccgtcatcgccgtagacttccaggtcatcgtcctgcacctggttggtcggccagaagccgaacaccgctcgggcgctgatgagtttttcgtcgatcagcttcttgagcatttcctgggcatcggcgtacagcgcagtggcggcctcaccgaccacttcatcgtcgaggatgcgcgggaacttgccggccaggtcccaagagataaagaacggtgtccagtcgatgtactcggccagcaccttgaggtcgatattgtccagcaccttggcgccggtaaaggtcggcaccactggcgtgtagctgctccagtcgaactgcggcttcttggcgatggcggccgggtagctcaggcgttcggtgcgggcgctacggttggaggtgcgttcgcgcacttccacgtactcttcgcgggtacgctcgacaaagccggccttgagttccttggacaacagctgcgtggccacgccgaccgcacgcgaagcgtcggtcacgtacaccaccgcatcattgctgtacttgggctcgatcttcactgccgtgtgcgccttggaggtggtcgcaccgccgatcatcagcggcaggtggaagtcctggcgctgcatttcgcgggcgacgtgcaccatctcgtccagggacggggtgatcaggccggacagcccgataatgtcgcacttctgctccttggccacctgcaggatcttctccgccggcaccatcacgccgaggtcgacgatgtcatagccgttgcagcccagcaccacgccgacgatgttcttgccgatgtcatgcacgtcgcccttcaccgtggccatcaggatcttgcccttggcttccggcttgtcgcctttttccagctcgatgaacgggatcaagtgggccacggcctgcttcatcacccgggcggacttcaccacttggggcaggaacattttgccggcgccgaacaggtcgccgacgatgttcatgccggacatcagcgggccttcgatcacttcgatcgggcgcgcgaacgacagccgggactcttcggtgtcttcaacgatatgcgtggtgatgcccttgaccagggcgtgctccaggcgcttgttcacatcccagccacgccattcttcggtctcggcttccttgacgctgccgtcgcccttgtacttgtcggcgatggcgaggagggcgtcggtgccgtccggcgtgcggttgagcaccacgtcttccacggcgtcgcgcagttctaccgggatctggtcgtagatctccagttggccggcgttgacgatgcccatggtcaggccgttgcggatcgcatacagcaagaacaccgagtggatcgcctcgcgcaccgggttgttgccacggaacgagaacgacacgttggacacgccgccggaggtcagcgcgtagggcagttcgtcacggatataggcgcaggcgttgatgaagtcgacggcgtagttgttgtgctcttcgataccggtggcgaccgcgaagatgttcgggtcgaaaatgatgtcttccggtgggaagccgacttcattcaccaggatgtcgtaggaacgcttgcagatctctttcttgcgcgcttcggtgtcggcctggccggcttcgtcgaaggccatcaccaccacggcggcgccgtagcgcttgcacagcttggcgtggtggatgaactgctcgacgccttccttcatgctgatggagttgacgatgcccttgccctggatgcacttgaggccagcctcgatcacgtcccacttggaggagtcgatcatgatcggcacgcgggagatgtccggctcgccggcaatcaggttgaggaaggtcaccatggccttcttcgaatcgagcatgccctcgtccatgttgatgtcgatcacctgggcgccggcttccacctgttgcagggcgacttcgagggcttcggtgtagttgtcttcacggatcaggcgggcgaatttggcggagccggtgatgttggtgcgttcgccgacgttgacgaacagcgaactgcgatcaatcgtgaacggctccaggcccgacaggcggcacgccttggggatgtccgggatcacgcgtggcgcgtaaccggccacggccttggcgatggcctcgatatggcctggcgtggtgccgcagcagccgccgacaatattgaggaagccgctctgggcgaactcttcgatgaccttggcggtttccgaaggcagttcgtcgtactcgccgaattcgttgggcaggccggcgttggggtgcgcggacacgtgggtgttggccttgttcgacaactcttccaggtacggacgcagttcgctggcgcccagggcgcagttcaggcccactgaaatcggcttggcgtgggcgaccgagttccagaacgcttcggtggtctggcccgacagggtgcgaccggaggcgtcggtgatggtgccggagatcatgatcggcagttcggtattgagctcctcgaacacaccttgcacggcgaaaatcgcggccttggcgttgagggtgtcgaagatggtctcgatcaggatcaggtcggcaccgccttcgatcaggcctttggtggcctcggtgtagttttccaccagttcatcgaaggtcacgttgcggtagccggggttgttcacgtccggcgacaacgagcaggtccggctggtcgggccgagcacgccggcgacgaagcgtggcttggccgggttctccagggtcttggcgtcggcgatcttgcgcgccaggcgtgcaccttccacgttcagctcgtaggccagttcttccatgccgtagtcggccatggagatgcgggtggcattgaaggtgttggtttcgaggatgtcggcaccggcatccaggtaggctttttcaatgccgccgatcacgtccgggcgggtgatcaccagcaggtcgttgttacccttgacgtcgctcggccagtcggcgaagcgtttgccacggtagtcgtgttcttccagtttgtagctctggatcatcgtgcccataccgccgtcgaggatcaggatacgttccttgagggcttgatgaagggcttgcagacgaacgctacgatcggacatgggactactctggtcaggcattacggagggcgtggatcataacaaacctgtgcggctttgcagcatgcccggtttttacatgaatatcgctcatgttgcaggggcgcatggcccggtagaatcatcggcaatttttcagcgcacgcattgaatcgggaccggatacatgtcacttcgcctcatcaccagcgccgtcctggcactggttgcctgcatcgctcaggccgacggatccgccccggcgatttcctacacccgcgacattcaaacgatcttcaccgagaaatgtgtggcctgccacgcctgctacgactccgcctgccagctcaacctgggcagtgccgagggcgcggcgcgcggcgcgagcaaagtgccggtctacgatggcgaacgcagccaggccgcgccgaccacccgcttgttctatgacgcctttggcaaacaggcctggcagcagaagggcttctattcagtgctggacgcccagggcagccaggccgcgctgatggcgcgcatgctggagctgggccataacgcgccgttgcaacccaacgccaagctgcccgaagacattgtgctgggcctgaaccgcgagaacatgtgcgccatgcccggcgagttcaacgcctacgccggtgcccaccccagggaaggcatgccgctggcggtcaccggcctgaccgaccagcagtaccagaccctgcaacgctggctggcgtccggcgcgccaattgatgagcaaggcctcgcgcccagcgcgaaagaagccctgcaagtgcagcagtgggaaaacctgttcaaccagcccggcgcccgcgaaagcctggtggcgcgctggttgttcgagcatttgttcctcgcccacatctatttcgagaatggcgagccggggcatttcttccagtgggtgcgttcgcgtacgccgagtggccagcccatcgacctgattgccacgcgccgtcccaatgatgaccccggcacccgcgtgtattaccgcctgtggccggtgcagggcgtgattgtgcataaaacccacatcacctacccgttcagtgccgagaagatggcccgcatcaaagagttgttctacgccggcaactggcaggtcaacgccttgccgggctacggtccgggccgccgcgccaaccctttcgaaaccttcgaagccatcccggccaaggcgcgctaccagttcatgctggataatgccgagtatttcgtgcgtacctttatccgtgggccggtgtgccgtgggcagattgccacggacgtgatccgcgacaatttctggaccctgttccaggacccggaccacgatctgtacatcaccgatgcacgttatcgcggccaggccacgccgctgctggccatgccggggcagaacgatgacgtgggcagcgtgctcagcctgtggctggcctaccgcgataaacgcaacgaatacgaagccctgcgccgtgacagctacgctgacctgccgccgccaagctggtcgagcctgtgggcgggcaatgacaatgccttgctgagcattttccgtcacttcgacagcgcatcggtcagcaaaggcctgatcggtgaagtgccgcagacgatgtggctgttcgactatccactgctggagcgcacctattaccaactggcggtgaactttgatgtgttcggcaatgtgtcgcaccaggcccagacccggctgtacttcgacctgattcgcaatggtgccgagcagaacttcctgcgattgatgccggccgattcgcgcgatgatttcctcgacgattggtaccagaacagcggcaagctcaagctgtggctggattacgaggccattgatgacgacaaacccaccggcctgcacctgaacgaaaaggatccgaagcgcgactttgccaaccagttgctcacccgttacggcgatttgaatgccagcccggacccgatcaaccgttgcagcggcgcctattgctcccgcgatgggatcgacccggccttgcaggatgcggagcaggcactgagccgcctgacctcacgcccagctgccgggctcaaggtgattgatcaattgcctgaagcgacgatgctgcgggttgaaaccgccagtggcaagcgtgtggtctatagcctgctgcgcaatcgtgctcacagtaatgtcgcgtttctgctgggcgaggcttatcgctatcagccggggctggatacgctgacgatttatccgggtgtgctgagcagctacccgaactttatgttcaacataccggcacaggaagtgccggagtttgtggcggaaatggagcaggccaaggatgccaagggtttcgagaagattgtggatcggtggggggtgcggcgcagtcatccactgttctggcagtatttccatgatttgtcgcagtacattcgtgagactacgccggtggaagagggcgtattggacatgaaccgctatgagaacctataactaatggcagtgatccagtcatctctctgagcgggtgctgaagcggtcggatatctatcttacgggattgcaaaggaagctccgactatgttgatttcagtgcaggcgctaagagcgttggctgcgtgggtggtggttggacatcacttcattcaggtgtttttcaactttgaagtggatacgcctatggcgtatctgttcgccgacaaaggcgccgttggtgtagacgtgttctttgtgatcagcggcctggtgattttcctggcgaccgccgacaaggcactgaccccctggcgtttcatcctcatgcgtttggcaaggatcacgccagcgtactggttctataccctgctcatggctttgttgctgttggctgtgccgtcgctgtttgcagaaacccacctcgagacgagtcatctgcttctgtcgctgctgttcattcctgctcagaacccaggggggtttggcgtctatccgctggtggacgtcgggtggaccctgaatttcgagatgctgttctatctactgttcgcctttgccttgctagtgcggcggtcatatcggttatgggtagtggcagcgctgctgtacttggcgtgttacctcatcacgccggccttgaattgggccgacggcttttaccggaatgacatcgtcttcgaattcctgatgggcatcatgatcggcatgctctactgctgcggggcgtgccggaccccaccatggctgccggtgctgggtatcgtggtggcctcagcggcgatttatcacggggcggatttgcctcgtgcgctggagtggggagtgcccagcgcggtattggtcatcagttttgtggcgttggaaccatactttcacggatcacgattgttgaagctgctgggtgactgctcttactcggtgtatttgctccacacgatggtgctgtgcgtcgggcgatggttcgctgagcgcaacggaattgatccctatgcgatgttgcccgtttgcctcgtgatgacagcagtgtgtgcatttttcagctaccaatggctggagaaaagcacctatctctggcttaagcgttggtttggcatggaggatccggcaatcctttcccgacaaaaatactaggactttgtacctgcgtaatattttggcgtaaactgccggcaagcctgtgaggagtttccatgactgccataaccattaccgacgccgcccacgattacctggccgacctgctgtccaagcagaacaccccgggtatcggtatacgcgtctttatcacccagcccggcacccagtatgccgagacttgcattgcctactgcaagcccggcgaagagaagcctgaagacaccgccctggggctgaaaagcttcaccgcgtacatcgacgccttcagcgaagccttcctggatgacgccgtggtcgattacgccaccgatcgcatgggcggccaattgaccatcaaggcgccgaacgccaaggtgccgaacgtcaacgccgacagcccggtcaacgagcgtatcaactactacctgcagaccgagatcaacccgggtctggccagccacggcggccaggtcagcctgatcgacgtggttgaagacggcatcgccgtgctcaagttcggtggcggctgccagggttgtggccaggcggacgtgaccttgcgtgagggcatcgagcgcaccctgctcgagcgtattccggagctcaagggcgtacgtgacgtgaccgaccatacgcagaaagaaaacgcctactactgagtaaggcgttcactgcggacaaaaaaacggcgccccgtgagcgccgttttttatgctttaaattcagtaagttgcaccatttatctaatgtagagtgttcgtcgcgaaaacggcagtccgattttttgtgaatgaatttattaaataaaatcagtagtttatgtttgtcttgtgatgttgagcatcaaggtcgatacagatgcgcatgccccgcccgatacaacgatgactcactgaaactatcactcgccaacacccgacccaccacaatcaacgccgtacgccgaaaccccttggccgctactttttcggcaatgtcgctgagagttccaacaacccaatcctgatccggccacgtcgcccggtgcaccacggtaatcggacaatccgccccgtagtgcggcaccagttcggcgacgatcttgtccaggtggttgacccccagatggatcgccatggtggtgccatgtcgtgccaggctgtcgaagtcctcaccggccggcatgctggttttatccgcatagcgggtcagaatcacgctctgggcgatgtcgggcagggtcagctcggtttccagcagggccgcgcaggcggccaccgccgtgacgccaggaatgatctggaacgggatgcccagctcgcgcaaatggcggatctgctcgccaatcgcgccatacaggctggggtcgccggaatgcacgcgcgccacatcctggcccttggcatgggcggccctgatcaggtcgatgatctgttccaggtgcaattcggcgctgttgaccactgtttccgcctgatgaccttccagtaccgccgccggcaccagcgagccggcatagatgatcgcctggcaactgcggatcagccgctggcccttgacggtgatcaattccgggtcgccggggcctgcgccgatgaagtaaacggtcatgggaaatcctgatgaaaaacgggtgagcatgaaatctgctcatgatcggaagcggcgattatcgggttttcagtcggcgcacgccaatgcaaaggtggcctgggcggttttctggcgggtgatcagcaggcgcgcaggggcgttggcgaggtgttcggccagggccagggcggcgctttcggcgatgccgtaacagccggtgtgggcaaaagccacgtccgattgatggctcaagcggtctgcataaatcgccagttgttcagcgttgaagcactgcaacggcagattcagcagcgcggccaaggccagcagcccgggttcttcctgtttgtgatcgatgctggccagcgcactgacgcggtggcgctcgataccgccctcgatgagggcagcatcaaacagggccagcagggtgtgaacatcacaaccccgctggcagcccatgccgactaccagtttcacgccgagtattgatcgtcacggttgcggcggaacagccaggcgctgatcaggcccaaggccagccagaacgccacgttggtcaactgtgatgcgatcttgaactgcgcttccagcgcctccgggaccagcatcgaatgcacttccggttgtggcgcgccgatcacgtgcggcactacgaggatcgcggcgcccagcgccttgagcagccagttgcgaccgaacacgatcagtgcgataccggctgcggtagacgcggcagtaccgatccaccagatctgccgttgtgccaggtcagcggcggcggtgcccggcagttcgggcggcaggcccagggtcggcgccaatacaaaggtcgcataacccgccaggccccagagcaagccttgagaggtacgggtcggtgcacgcagggtgtacagaccggccagcatcaacgcgaagccaacggcgaccaccaggttgccgcctgtggtggacagcacgcgctgccagccgtcttccggctcccaggcttcggcgtcgtgggtgtgagcagccgcaccttcggcgtgctcgtgcaactcggtcgctgccggggctttttcaaaggtttccgcctgcagaatcagcggggcgacccagaagctttgcagcagggtcagcagcagggcagccagaaggccggtgaaacctgcggtttgcgcaatacgcttgatcatgtcggcaggtctcagtggcacgggaacgcggcgctgtggcgggtatcgtgggcagcgttgtgtactgcctcgatgtgcgagaaaccggcgaagtacaccaggcacgcaccgaggatcgacgcaccgatggcggcggtcaggcgttggctcagggtagaggtgctgctggcggagtgcgaagtgctgctgatgatcgacatggcgcgtccctttcaggtgtcagggtgaaacgagcgcatgaaaaccccgcgagccaggcacgcagggttctgaacagcgcccgcccaccgcgggtttgttatctgattttttcgggccggtctccgggcttgcgaggggctcaatgcctgaaaacgtcgccttcccatgccgcctggcacagtggatatgacgtttcgctcgcttaccgttgcgggggcagcaccggactgtcatgtgtgtgcatgagtcaccggtttcccgtttcaccctttgcagggcacccgaaacaagatgtgtaggagagcatgggggtgggaggggagtcaattggggatgtgttttctgggggcatatccgttgctgcggtaacggcggcttagggttccgcccttacggcggcccacgtattcaagcctgcgttcggccagcgtgtttgacggggcgaccccagatcaaaagcaagagcgcggcggccttagagccgaccggattgtatggctggtactcggtcaaagtgtgggagggggcttgcccccaatggcagtgggtcagtcactgatgagttggctgatacaccgccatcgggggcaagccccctcccacagtttgatcttcatgtatcagttgaagggtggtttgctctggctctagatctgcttttgattttgatctagggcggccccccaaatcactgtcggattacgggcataccgagcctaggcgaggtaccgagtgttggggtaagagcgttttgcttacttttgactgggccggcattccggcttttcaaaagtgagccgctgtaagagcggaaccaatagcggccgttaccgcagcaacggatatgtacacaggccaaccaaccccatcattgaccatcccccaagcactgcgtagccttgcaccctcgaggttcttcggcccaggccgaagctaagaagggaacgcggtccaagccgcggctgcccccgcaactgtaaagggtccagctgactgccacgccactgccgacaaggcgggaaggcgcagccagcgccggtcgcaagaccggcaagccccaagccaggagacctgcctcgcaaccgattttctacttcaaccgggcggggtgatccggtgacgaaatccgctgctgcgcaccgtcgcagggccatcgtcccgtatgcccgcccccaagggcatccgatgaaaacactggccaaactccccgtcaccatcgtcactggcttcctcggctcgggcaagaccaccttgctgcgccatatgctcgacaacgcccagggccgtcgcatcgcggtgatcgtcaatgaattcggcgagctgggcattgacggtgaaatcctcaagcagtgctccatcggctgcaccgaggaagaagccaacggtcgtgtctacgaattggccaatggctgcctgtgctgcaccgtgcaggaagaattcttcccggtaatgcgcgaattggtcgcccgtcgcggcgatctcgaccatatcctcattgaaacgtccggcctggcattgcccaagccgttggtacaagccttccagtggccggaaatccgcagcgcctgcaccgttgacgctgtgatcaccgtggtcgacagcccggctgtggccgccggtaccttcgccgcattcccggaccaggtggacgcccagcgcaagctcgaccccaacctggaccacgaatcgccactgcacgagctgttcgccgaccaactggccagtgccgacctagtgatccttaacaagaccgacctgatcagcgccgaagacctggcccgcgtgcgcctggaagtcgccgaagagctgccgccggcggtgaagatcgtcgaagccagcagcggtcgcttgcccctggatgtactgatcggcctgggcgccggttccgaagagcacatcgacggccgccacagccaccacgatcaccaccacgaaggtgaagacgaccacgaccacgatgcctttgactcgatctccatcgacttgccgcaagccgatgaagcactgctgctcgatgccctgacgcaactggtggtgcaacacggcatcctgcgcgtcaaaggtttcgccgccatcccgaacaaaccgatgcgcctgctgatccagggtgtgggcacgcggttcgacaaacacttcgaccgtgcctggggcgctgaagaagcgcgcaccacgcgcctggtgctgatcggccaggaactggacgcggcgggcctcgaagcgcaactgcgcgccgccctcagcgtctgacccatgcacctgctcaggacccagcccggtggtttcgtctcggacgataatattgccgaccttggccaaagccccgctgacctggtgatcctgtgcagcggcgattccagcctggcgctgctggccgaagcggcccagcagttgcccgacgactacccaagcctgcgcctggccaacccgatgcaggtgcagaaccatgcctcggtcgacctgtacgttgatgaagtgctgcgccacgccaaggtcatcttgatttcgctgcatggcggtatcggttactggcgctacggcatcgagcgcctggtggaactggccgaacgcggtgtgcaactgatcctggtaccgggggatgatcgcccggacccggaactcagcgggctgagcaccgtcggtgccgaagaacgtgatcggctgtggcacttcctgcgtcagggcggcctgggcaatgccctggatttctatcgctgcctggccagcgcttacctgggtcgcgactatgcctggggcgagccgcaaaccctgccacgcacggcgatctatcatccgcagcatgccaacgcccgcctgaacgattggcaggcagactggaacgccgactggccggtggcggcggtgttgttctaccgctcccatttgcaggcggccaataccggttttatcgatgtgttttgccagcgtctgcaggcggcgggcctcaacccgttgcccatggcggtggccagtttgaaagaacccggctgcctggcggtggtcgaggacctgctggatgaggtcggcgcggcggtgatcttgaacaccaccggcttcgcccaatccagccccgaagcgccgcacctgcgcccgtttcgccgcaatatcccggtgatccaggccatttgtgcccaggataaccagcccggctgggaggccagcgagcagggccttggcccccgcgacctggcgatgcacatcgcgttgccggagttggacgggcgcatcatcagccgaccgatcagtttcaaggacctggcctggcgcagtgagcgcagccagtcggatgtggtgtgctaccgcgccgcgcccgaacgcatggattttgtcgctgagctggcgcggcgttgggtcgaattggcgcgagtgccgaatgcagagaaacgcattgcgctgatcctcgccaactacccgacccgcgacggtcgcattggcaacggcgtgggcctggatacaccggcggcggcgctgaatatcctgcgtgccctgaaaaccgaaggctatccgctgccggacttattgcccgacagcggcacggcgttgatccatgagttgctcggcggcgtcaccaatgacctggacagcctcgacctacgcccttgccatcaaagcctgggcctggacgagtacgagacgatgttccagcgcctgcccgaagccaatcgccaggcggtgctggaacgctggggcgcgccgcagaacgatccgatgtgccgcgacggtcgcctgatgatcgccggcctgcgcctgggcttgacgtttgtcggcatccagcccgcgcggggttaccaagtggacgccagcgccgtgtaccacgacccggacctggtaccgccccacgcttacctggcgttctacttctggctgcgccacacctacggcgcccacggcgtgatccatgtgggcaagcacggcaacctggagtggctgccgggcaagggcgtgggcctgtcggaaaactgctggcccgatgcgttgctggggccgctgccgaatatatatccgtttattgtcaatgacccgggcgagggcgcccaggccaagcggcgcacccaggcagtcatcatcgaccacctgatgccgccgctgacccgtgccgaaacctacggcccgctgcgtaacctggagctgctggcggacgaatattacgaagcgcagttgctcgatccgcgccgcgccctggagctgcagaaggacattctcaagctggtgcgcgaaacccgcatcgaccaggagcttgagctggagagcgacgccgatgctgccgtgtggttgccgcgcctggacacctacctgtgcgacttgaaggaatcgcagatccgcgacggcctgcatatttttggcgagtcacccgagggtcgcctgcgtatcgacaccttgctggcgctgctgcgcatcccgcgtggcgatggtcgaggcccgcagtcgagcttgctgcgcgtgttggccaaggccttcgagctgggcttcgacccgctggactgcgccctggccgaaccctggaccggacgccggccgctggtgctgcagaatatcgatgggcagttgtggcgcaccgccggtgatacccgcgagcgcctggagctgtacgccgcacgtttgatcgagcaagccctggaaggaccgcttgaacagctggaggaacccggctgggaagacgtgaaggccgtgatcgaaagcctgcgtattgtcgtggcgcctcggctggatgcctgtggcccggcggaaatgcgcggattgctggatgccttgagcggccgtttcgtgcccgctggccccagtggtgcgccgagtcgcgggcgtttggatgtgttgcccaccgggcgtaactttttcaccgtggatgtgcgcaacctgcccaccaccacggcctggcgcatcggtttccagtcggccaacctgattctggagcggcacctgcaagaccatggcgaccacctgcgccaactcggcctgtcggtatggggcaccgcgaccatgcgcaccggcggcgatgacatcgcccaggcgatggcgctgatgggcgtgcgtccggtgtgggcgacgggcagccagcgggtggatgactttgaaatcctgccgatcagcctgctcgaccgcccgcgggttgatgtgacgttgcgcgtgtccggtttcttccgggatgcctttgccaacctgatccgcctgttcgatgcggcggtgcaggcggtggctgcgctggacgaaccggacgatctgaaccccctggccgccaaggtgcgcagtgagcgtgaagcgttgctggcttcgggcctggacgcagaggccgcggcaaaacaggccggctggcgcatctttggtgccaagcccggcgcctacggtgcgggcgtgcagggcgcgatcgacgggcgtctctggcaaagccgtgaagacttggccgaggtttacctgaactggggcggctacgcctatggcggttccgacgaaggtactgccgcccgcgggcaattcgcccagcgcctgagccaggtgcaggccgttttgcagaaccaggacaaccgcgagcacgacctgctcgattccaacgattactaccaattccagggtggcatgctcgctgccgtggaaaccctgagcggcgacaaggccgccagctaccatggcgaccatagccagcctgacctgccgaagatccgcacgttgaaggaagagctgaaccgggtgatccgttcccgtgcagccaaccccaagtggatcgaaggcgtgaagcgccatggctataaaggtgcgtttgaaatggccgcgacggtggacaatctgttcgccttcgacgccaccaccgcactgatcgacgatcaccaatacgcactgttggccgacgcctacttgctcgaccccgacacccgggcctttgtgcaacagcacaaccccgatgcactgcgcgacatgaccgagcgcatgctggaagcccagcagcgtggcatgtggcaggaaccgggggcataccgcgaggcgttggaaaacctgttgctggatatagaagaagacagctgatgactgatattccccatttcccgctgtccgccgtggtcggcgccgatgacctgaaactggcgctgtgcctgaccgctatcgacccgaagattggcggtgtgctgatcgaaggcccgcgcggcatggccaagtccaccctggcgcggggtttggccgacctgctggccagtggtcagttcgtgaccttgccgttgggcgccactgaagagcgcctggtcggcacgctggacctggacgccgcattgggcgaaggccgggcccagttctcccctggcgtgttggccaaggctgacggcggcgtgctgtacgtcgatgaagtcaatttgctgcccgaccatctggtagacctgctgctggacgtggccgccagcggcaccaacctgatcgagcgcgacggcatttcccatcgccattcggcgcgcttcgtgctgatcggcaccatgaacccggaagagggcgagttgcgtccgcagttgctcgaccgcttcggtttcaacgtggccttgagcgggcagaccttgccggccgagcgtgggcagatcatccggcggcgtctggatttcgacagcgaccctgcggcgttctgcacgcagtgggaggtgtcacaagcggcattgcgcgagcgctgcacccaggcacgggcgcggctcgacagcattgcgctggatgaccaggcgctggcgcagatcaccgaacgctgctttgcggcgggggttgatggcctgcgtgcggaccttgtctggttgcgcggtgcgagggcccatgccgcgtggcggggagccagcgccatcgccgaggaagatattcaagcggttgccgaattcgccctgcgccatcgccgccaggaacagtccccaccggccagcccgccaagcgaagggcagtcgccgaaaccctccgacacctcgtccggtcaaggccaatggggcgatatgcccgcaccggcgctgcccacgggcgcacgccgggaagtgccgacctggccaaaaaagccctaggcattcgccctcgacctgacgcgggggcggatgcgcgacccaaggcagggcgactaggcaacggcaggcaaggcaaggcacgcaacgcgaagcagggcgcgatcaactggccgggcaccttgctcggtggtcggccacaaacgcgacaggacttgctgtttcacctgcgcagtcgtgcggcccatgaactgtggttggtgattgtcgatgcgtcggcgtccacccgacggcatcgagcactcaccgacgccaagggtttgttggcgcagttgtttgatgacgcctaccgccagcgggcacggatggcgttgttgacggccagcgggcaaatgccgaagtggcaggtgcaagggttgaaagcggccaagggcttggcgggttggctggaacagttgggcgcgggcggcggtacgccattgctggcggcgcttgtcgaggccggcaattggctggcattgcggcgcaagcgctacccggctgaacaacagcggttactggtgatcactgacgggcgactcaaggaagttactgggctaccgcagttggagtgcccgggcctgctggtcgatatcgagcgtgggccgatcaggttgggtcgcgcgcagcaactggcggcagggttgcagttggagtatcggcatatcgatcagctgtagtgcctgggcaactgctatcgggggcaagccccctcccacaggggaatgcatttcaaatgtgggagggggcttgcccccgatgaggccctgaaattcacgacaaaacctcagccagcccccggcacattcggccaaagattggccaccagaaacaaccgctcggcttcctcccaatcctcacccacctgtaccagccgcaccagcagttgcgccggagccatcgggtcaaggtcggccagccagccgtgcatctgctcttcgctccacacctcattcgcggggtaatgcgccggcgccagccaggcatgccggggcaggggctgccaatggcccggttggctgcggctgacaaacgcttgccagtcccgttgatgcaaccaacgcccgcgcaaatgctgcggatgggcgccactggggggcatggcctggccgggccaggggtagagcaggtaaccgcccaaccacaaatgcgcatcaaactgctggacatccaacgcggccagcacttcacggctttcctcccgcgcggatatcggcaattgatgttgggccagatgcgccaacttgcggtccagtcggtcatgacaacccggccccagccactgtgcggtgtcctgaccttcaccgtcctgcggccccagatacagcttgatcgccagttccaggtgatgcacgccatcgcggtcacgcagcagcatatccagctcgccgagggtatgcccggcacggcggatcggcaggttggcggccagcaattccacgcccggcgcatgttgcacggcgaactgccacaggcgttcgtaatacaggcccaggcggcgcgtgcgcgacaggctcaaccattgctgcaaggcgctgctgtcctggtccagctggcgcagccagcgttccaacagatgcggcgcctgcacccaatcgctgccggccagcgggtggcgttgcggccacggcgtctgcgcgagcatcggcggggcgagcatcacccacgccaggtcgcgcacctcggggtggcgcagctggcggggcaggttgtgcagatcggggaacacagtcatggtccgagcatagccttttaactgcgctgaaggtggctgagaaccgttgtcatcaaggcttcacggcgacaaaggattttgcctgagacggcctttcgcccataatcgttcttttttgccacactccacatcccgcaggagccccatggagcaatttcgcaatatcggcattatcggtcgcctgggcagtacccaggtgttggacaccgtccgccggctgaaaaaattcctgctggaccgccacctgcatgtgatcctcgaagacaccatcgctgaaatcctgccgggccatggcctgcagacctcgtcgcgcaagatgctcggcgaagtctgcgacatggtcatcgtggtcggcggcgacggcagcctgctcggcgcggcccgtgcgctggcgcggcataacgtgccggtgctggggatcaaccggggcagcctggggttcctcactgatatccgccccgatgagctggaagtcgaagtggccaaggtgctcgacggccattacctggtggagaaccgcttcctgttgcaagccgaagtacgccgccatggcgaggccatcggccagggcgatgcgctcaatgacgtggtgctgcaccccggcaagtcgacgcggatgatcgagtttgagctgtatatcgacggccagttcgtgtgcagccagaaggccgacggcctgatcgtcgccacgcccacgggttccaccgcctacgcgctgtcggcgggtggcccgatcatgcatcccaagctggatgccattgtgatcgtgccgatgtacccccatatgttgtcgagcaggccgattgtggtcgacggcaacagtgagctgaaaatcgtggtgtccaaagacatgcagatctacccgcaggtgtcgtgtgacgggcagaaccatttcacctgcgcccccggtgacaccatcaccgtgagcaagaaggcacagaagttgcggttgatccacccgctggaccacaactactacgaagtgtgccgcaccaagctgggctggggcagccgcttggggggtggaggcgactgatgctcgatcccgcgcgtagctacgacctgattggtgacgtgcacggttgcgcccacacccttgagcacttgctcgacctgttgggctaccacaagcagggcggcacctggcgccatcccacgcgtatggcggtgttcctcggcgatatcatcgaccgtggcccgcgcatccgcgaggcgctgcatatcgtccacgacatggccgaggccggccatgcgctgtgcatcatgggcaaccacgagttcaacgccctgggctggaccacaccggcaccgccgggcagtggcaagcagttcgtgcgcgagcacaacccacggcatgcgcggttgatccacgagaccctgacccagttcgaacatcacccggccgactggcacgacttcctcggctggttctacgacatgccgctgtttgtcgacgccgggcgttttcgcgtggtgcatgcgtgctgggacgatggctttatccagccgctgcgtgccaccttcccggacggctgcatcgaccagcacttcctgcaggccgcggccgtgccgggcagttttgcctgcaacgccttcgaccgcctgctgcgcggcaccgacatgcgtttgccggacggcctcacgttgaccggtggcgatggcctgacgcgctcgttcttccgcaccaagttctgggaagacgaccccaagacctacggcgatatcgtgttccagcctgacgcactgcccgagccggtggcgcgtacaccgttgtcgtccaccgaaaagaattccctgctgcgctacggcgtcgacgaaccgctgttgttcgtcgggcattactggcgcagcggcaaaccggcgccgatccgcccgaacctggcctgcctggactacagcgcggtgctgtacggcaagctggtggcgtaccgtctggaccaggaaacccgcctcgacccgcgcaagttcgtgtgggtcgatgtcgagcgaccggaggtgctcacatgagcccctgcgcgctgcacatgcactcttgaggaacctccatggatgattcgacgttcgaccaactggaggctgcgctggctgcggctcccggtaacgtcgcactgctgaccgtgttgctgggcgccagccttgagcgtggcgaacacgcgcgtgggctgaagctgctgcccgccgaccttgagcaatggccagaggcttcggcgctgaagctggcggcggcgcaattgctgctggccgacggccaggcgcagaaggcgttgttgttgatcgagggtgaagacccgacggcgcgcctgctcaaggcccgtgccctggctgcactcgagcgtctcaaggaagcccaggtggaataccgcgcagcggtggacgccaacccggcgctggaagacatggcgctgtggcgccgcctgaatgtgtcggtggtggacttccctggcgccgaaggccgcccgcgcctgcgtgtgatctccaatgacgacaccgacaagagcgaagtcgtgcgcctgctggtgccggaaaacgaaaccctgaccttcgatgatatcggcggcctggatgagttgaaaaagaccatccacaaaaagatcatcctgccgtaccagaaaccgggcctgttccagcgctttcgcaagaaagtcggcggcggggtgctgctgtatggaccaccgggttgcggcaagaccatgctcgcccgcgccacggccggggagtgcaaggccaccttctttaacgtggcgatttccgatgtgctggacatgtacatcggcgaatccgagcgcaagttgcacgcgctgttcgagcaggcacgggcccaggcgccggcggtgatgtttttcgatgaagtcgaggcgctgggcggcaaacgtgcgaatacccgcgagtcgacctcgtccaagctggtgagccagttcctctccgagatggacggttttaccaatgacaaccacggcgtgctgatcctcgccgcgaccaacgtgccctggtcggtcgactcggcgttccgccgccccggccgctttgaccgcgtgctgtttgtaccgccaccggatcgcccggcgcgtgaggcgatgctcaaggcgatgatgaaaggccgcccgatggcagacgacatcgacttcgccttcctggccaagaacacctcgggcttctccggtgccgacctcagcgagttggtggaaaccgccgccgatgaagccattgaagcgtccatcgacagtggcgccgagcagtcgatttgcgaccggcatttcaagcaagccttgaaagaggtgcgcgccaccaccctggaatggctgaccacggcgcgcaattacgcgcggtatgccaatgaaggcaaccagtacgatgaagtgctggctttcctcgacaagcacgggaagggtcgctgatggcgcagtacggtggttatcgcatcgaagacgaaccgcgcccgggcgctctggccaagtgggcggtttcgccattctggccgctgctcggcctgatgctcggtggcgcctggctgggtttgccgtggttcgtgttcaactccattgccgtcggcagcccgacgcgggtgcgcgaatgggtgctggccggcgtggcgctggtgggcagcatcgtcatcggcttcgtgttgctgcaactggttggcgcggggtatttgcagacccaggcgcaaatccagtacgccttgctggtgttggtggtgtggaaactcaccctgggctacctgctgtatatgcagcagaacgcaaccattgagatttaccagtactacggcggcgagttgagccgttttggttttcccttggcgttgattggtggcttcgtgctcaaaggcatggtcgtcaaatggctgccgtacaccctgtggtacctggtggtgagctgatgaataccgactatctgctgcaactggcttaccaacgcctacaggctgaccacaatgatggcgccatcgacgcactgcgccagttgctggccagcgacccgcactcggccgaggcgcatgccttgctggcgatctgcttgatgaatatgcgtcgcgtgcatgctgccaagcgcgaggtgcagttggcgcttgccgccgatgcgcagttgccgctgtcccactacgccgccgcgcaggtggcgattgccctgcgcaagttcaagctggcccaggaacatgtcacccagctgttggacatggagccgctgaacccggcgtactaccgttgccaggccgagttgtaccagctcaccggtcgcctagcgcaaagccgtgaaccgctggaaaaagccttgcaactgggccccgatgatcccgccaacctggtagccatggcgcagttccaccgcgccagcagccagtgggaccaggcgtatcagttcgcgcgccaggcgttgcaggctgatccgtcgaatgcggcggcagtggtggtgctcggccacctgttgttgcgcgaaggcgatatcaacggcgcccgtgaccatgcgatctgggccttgcaggagaacgccacgaacgttgcggcgctgcacctgctcacggcggtcaaggcccgcagcaatgtgttcctcggcacctggtggcgcttcaatagctggatgaacgagcgcagcgccacccgcgccattatcctgctgctgtgcatgtttgtggtctaccgtgttgtggttatcacgttgactgcccagggctatccgcaagtggccgagctgatcaattggctgtggctggcgtttgccgcctacaccttcgccgcgccgcagatcttccggcgccttttggacaaggagcttgtacaggtcaagctctccaaggaattctgacgggccaggacccgtcacccacgtactcgctgaacctcagaggctgttcacatgtcgtcttttgctgaaatgatcgaaaacatcaccccggacatctacgagagcctcaagctcgccgtggaaatcggcaagtggtccgatggccgcaagctcaccgccgagcagcgcgagctgtcgttgcaggcggtgatcgcctgggaaatccagaacctgccggaagaccagcgcaccggctacatgggcccgcaggaatgccagtcgaaatcgaccaccgtgccgaacatcctgttcaagtcggatgcgatccattgattgaaatcggtcgcggtgcagtcagcaagatgtcggcgcaactcggtgagccgaccgttcaatacgcgtttcgcttaggaagtgccgaggtgccggtcaatccgttgatcggcacccacgtgcgcctggaatacctcggtgccatccattgcagccattgcggccgcaagaccaagaccagcttcagccaggggtattgctacccgtgcatgacaaagctggcccagtgtgacctgtgcatcatgagccccgagcgttgccattacgacgccggcacctgccgcgatccaggctggggcgagaaattctgcatgaccgaccatgtggtgtacctggcgaactcgtcaggcatcaaggtcggcatcacccgtgccacccagttgccgacacgctggctcgaccagggcgcgagccaggcgctgccgatcatgcgcgtggctacccgccagcagtccggttttgtcgaagacctgttccgcagccaagtggccgacaagaccaactggcgtgcgctgctcaagggcgacgcccagtccgtcgacctcaagcaggtgcgtgaccatctgttcgccgcctgtgctgacggcctgctgggtttgcaggaacgctttggcctgcaggccatccaaccggtcaccgacatcgagccgctcgaaatccgctacccggtggagcagtatccggcgaagatcgtcagcttcaacctggacaagaacccgattgccgaaggcacgctgctggggatcaagggccagtacctgatcttcgataccggcgtgatcaatattcgtaagtacacggcctaccagctcgccgtgcatcagtagaaggatgccacccatgcgcaccgaacaaccgaagatgatttacctcaaggactatcaggcgccggactacctgatcgacgagacccacctgaccttcgagttgttcgaggaccacagcctggtccacgcgcaactggtgatgcgccgcaatcccgagcgcggcgccggtttgccgccgttggtgctggacggccagcagctggagctgttgagcgtgaacctggccgatcaggcactgagcgctgatgactacgagctgaccgacagccacctgacggtgcatccgcaaagcgcgacgtttaccctggataccacggtaaaaatccatccggaaaccaacactgccctggaaggcctgtacaagtccggcagcatgttctgcacccagtgcgaggccgagtgctttcgcaagatcacctattacctcgatcgcccggatgtgatgagcaccttcaccaccacggtgatcgccgagcagcaccgctacccgattctgctgtccaacggcaacccgatcgccagcggtccgggtgaggacggccgccattgggcaacctgggaagatccgttcaagaaaccggcttacctgttcgccctggtggccggcgacctgtggtgtgtcgaagataccttcaccaccatgaccgaccgcaccgtggcgctgcgcatctacgtcgagccggaaaacatcgacaagtgccagcacgccatgaccagcctgaaaaagtccatgcgctgggacgaagaaacctatggccgtgagtacgacctcgacatcttcatgatcgtcgcggtgaacgatttcaacatgggcgccatggaaaacaagggcctcaacatcttcaactccagcgccgtgctggcccgcgccgaaaccgccaccgacgccgcgcaccagcgggtcgaggcgatcgttgcccatgaatacttccacaactggtcgggcaaccgcgtgacctgccgcgactggttccagctgtcgctcaaggaaggcttcaccgtttaccgtgactcgcaattctccgccgacatgaactcggccacggtcaagcgtatccaggacgtggcgtacctgcgtacccatcagttcgccgaagacgccggtccgatggcccacgcggtgcgtccggacagctttatcgagatctccaacttctacaccctgaccgtgtacgaaaagggctcggaagtggttggcatgatccacaccttgctcggcgccgaaggcttccgcaaaggcagcgacctgtacttcgaacgccatgacggccaggccgtgacctgcgacgacttcatcaaggccatggaagacgccaacggcgccgacctgacccagttcaagcgctggtacagccaggccggtacgccgcgcctggcggtgagcgaggcctacgacgccgcggcgaaaacctacagcctgaccttccgccagagctgcccgcaaaccccggacaaggtggaaaaactgccgttcgtaattccggtggagctgggcttgctggacgggaagggcgctggcattgccttgcgcctggccggtgaggcggctgcgggtggcacgtcgcgggtgatttcggtgaccgaggccgagcagacgtttaccttcgtcgatgtgcctgagcagccattgccttcgctgctgcgcgggttctcggcgccggtgaagctgagcttcccgtacagccgcgaccagttgatgttcctgatgcagcacgacagcgacggtttcaaccgttgggatgccggccagcagttgtcggtgcaggtgttgcaggagcttattggccagcatcagcaaggccaggccttgaagatggatcagcgcttgatcactgcgctgcgcagcgtgttgagtgatgaaagcctagaccaggcgatggtggcggaaatgctgtcgttaccgggtgaagcctacctgactgaaatcagcgaagtggcggatgtggatgccatccacgccgcccgtgagtttgcgcgcaagcaactggcggacaacctgcacgaagcgttgtggctgcgttaccagtccaatcgcgagctgtccaaacaaacgccgtacgtggcggccgccgagcactttgcccgtcgcgcgttgcagaacatcgcgctgtcgtacctgatgctcagtggcaagccgcaagtgttggccgcgacgctggaccagttcgacaccagcgacaacatgaccgagcgcctgaccgcgctggcggtgctggtgaattcgccgttcgaggcagagaaggccaaggcgcttgcggtgtttgccgagaacttcaaggacaacccgctggtcatggaccagtggttcagcgtgcaggctggcagcacgttgccgggcgggctggcgcgggtcaaggcgttgatggagcacccggcgttcacactcaagaacccgaacaaggtgcgtgccttgatcggtgcctttgccgggcagaacctgatcaacttccacgcggcggatggctcgggctatcgtttcctggcggacttggtgatccagttgaatggcttcaacccgcagatcgcttcacgccagttggcgccgctgacccgctggcgtaaatacgacagcgcgcgccaggcgctgatgaaagccgaactggagcggattctggcgtccggtggtttgtcgagtgatgtgtttgaggtggtcagcaagagtcttgcctgagttgcatcgttgaataaaaaacggcctgttgaacaggccgttttttttgcctcagataaccggtggtcgcgcggtgtcgaggccgttatcgatggggaagcgctctgcgatgatcccgtgcggcacgccaagcgggatggcgctggcgctgtcgagacgggtgacgtgatcggccgacagttgcacattcaacgcgccaagggtgctgtccagctgggcgcgggtgcgcgaacccaggatcggcaccagcgcggtggtcgagcgccgggccttttcccgcagccaggcgatggcgacgtgggtcggcgtggcgtcgatttcaccagcgaccgccagcaacgcgtcgagcacggcggtttcacgcgcactgtgttcggcgtgcaccaggatcccgagtttgttggcgcggttgtcgtcctgggtgttgcggtacttgccggtcaggaaaccgccgcccaggggggaccacagcgtggcgcccagccccagcgcttcggccattggcagcaactcgcggtcggcgctgcgttccaccaggctgtattccacctggacgccgatgatcggtgcgaagctgcgcacgtcggccagcaggtcggcgcgggcaatgcgccaggcggggaagttggacaggccggcatagtggatcttgccggcgcgtaccaggtcatcgaggccgcgcaggatctcttccatgggcgtgacgttgtcgctcatatgtgcccagagcaggtcgatgcgctcggtgttcaggcgcttgaggctttcttccaccgagcgcatcaggttcttgcggttgttgccgacgcggatcgtgccttcatcggacggctcggtgcgcagggtgtacttggtggctaccaccaggttgtcacgttccgaggcgataaattcccccagcagcttttcggcctggccgaactggtaaccgttggcggtatcgaggaagttgcccccggcttcgaggtaaccatcaaagatcgccttggcttcgtcgcgctcggcgccatggccccaacccgtaccgaaattaccggtgcccaaggccagttcagatacctgcaggccgctgcggcggccaaagattttattacgcatacaaggactccagaggcagtgattgtcttacatgtttggtaacatgtatttaatatgatatgcataatttatcgggtcaagcgacttttttactgctgacgatttctgacagggggctttgctatgctgctgcacttttccattttctggcgggaaaccctgtgtcgcgtaccactcgtctactgactttgctccaggccctgcggggcaagaagcgtccggtgaccgctgccgtgctggcggcgcagttggaggtgtccgagcgcacgctgtatcgcgatatcgccgaattgacggccttgggcgcgccgatttttggtgaggcgggggtagggtatgtgttgcgcagtggcttgtttctgccgcccttgatgctgaacgccgaggaaaccgaagctatcgtgctcggcttgagatatgtggaccagcgcggcgatgacgtgctcagccgcgctgccgccaatgccctggcgaagatcgccgatgtactcgaccctgccgcccaggaagccttgcgcaacccgacgctgctgccggggccgcccggcttcggttacccggaaaaccgtgtgccgctcaacgtgtttcgcggggccattcgcaaccaggccaagctgcagatcgattacgccgacgccagccagacccagagccaacgcctgatctggcccctggccctgggctttctgaatgaagtacgggtgatcgtggcctggtgtgaattgcggggggcctatcgcacctttcgcaccgaccgcgtggcgagtgcacaggtgcttggcgaacgttacccggggcggcgcagcgattggctgcgggcctggcgcaagttgatggaacagaacgaatccgggccgtttactcctgacaaaaactgacacaaccctggcttagcatggcactacaaatcacccagaaaggagctgtgtcatgtctatccctgagttggcaccggccatcgtggcctatatcgcggcggccaatacccgtgacacctcggctatcgcccagtgttttgccgaggatgccaatgtgttcgatgagggccagcaccaggtcggcgctgccgccattgcgcgctggatggaagacaccgggcgtcgttaccagccgcgggtcgaagtgctcaaggtgcaacaccgtaccggcaaggtgctggtcagcaatatcgtgtccggcaatttcccgggcagcccattggagctgcgctacacctttcgcttgaacgagcagggcaagatttcgcggctggatatttcgctgtagttcatactggcgggcatgactttcgactcgcccctcgctgcctaccaatacgccgttgctcaaccgggtttcgtcgccgacgccgctcagcgccgcgcggtggacgccctgcaagcctgccacgaagccctgcaccacagccatgcaccgatcaccggcgtgtacctgtggggcccggtgggtcggggcaagacctggctgatggaccagttctaccaaagcctgcaggtgccagcgcggcgtcagcactttcatcacttcatgcagtgggtgcatcagcgcctgttccaactgaccggcacccacgaccccttgcaggccctggcccgggagctgagccaggcagtacgcgtgctgtgcttcgacgaattgttcgtcaatgacatcggtgacgcgattatcctcgggcggctgtttcaggtgatgttcgatgaaggcgtggtgatggtctgcacctccaaccaaccacctgaccagctgtatgccgagggtttcaaccgcgagcgatttttgccgggcattgcggcgatcaagcaacatatgcaggtggttgcggtggatgggggagaggatcaccggttgcatccgggcgcgggtattcagcgctactgggccaaccaacccgaggtactggcgggcgtgttccagcgcttggcccaaggtcaaccgactcgcagcgggccgctcgtggtggggcaccgcaccatcgtcgccgtgcagtccagcgacacggtgctctggtgtcgttacgccgacctgtgcgaacaaccgctggcggccatggacttcatgctgctgtgcgatcgcttcaaggcgatcctgctcggtgaagtccccaacctcagtgcgcaaaaacggcctggccggattgcccggggcactgaggatggcgtgcaacgtgtagtggccggtgatcgccaattgccggagttgtcggtgcacgatgacagcgtgcgtcggtttatcgccctggtggacgagtgctacgaccgtaaagtgccgttgttcatcgaggcccaggtgcctctggagcgactttataccgagggctacctggagtttcccttccgcaggacactcagccgcctgcaagaaatgcagttgcagcgtttcggctgacgcccgtacgaaaaaatccaggagtcggccggttgcgcgttttcaaccgagtaaccttcgcgctttcgtgcgcatatttgtagttaatctccttcatctggcgcctgctccacgcttacaatcgtgcccctcacagggagccgaatcccttgtaatcgtgatcgaggaaggacatggacaccccagacatcctggtgctgcaagccagctacaccaaccccgtgcatgccgacgccatcggccgcgtgctcaaccattacgccgaagacccgatgggcggtggccacagcctgcccgccgacctcctggagcaactgccaggcgagctggcaaagcggcctcatgcattcagcgtactggcgtttgtaggcggtgagccagcgggtctggtcaattgttttgaagggttttccacgtttgcctgccgtcctttggtcaacgtccacgacgtggcggtgatggaggcgttccgtggtttggggctgagccagaaaatgctgcaaaaggtcgaggaaattgcccgtcagcgtggctgctgcaagatcaccctggaggtgctcgagggtaatgccgtggctcaatcggcatatcgcaagtttggttttgatgattcgaagtttgacccggcccacgggcgcatgttgttctggagcaaaccgctttaataaataacaggcaaaaaaaggcgccattaaatggcgccaagttgaccttaaccaaaggagcgggatggcaaagggtattacggttacatcaagtgtttggttgttgctcggcagcggactggtcagcggtttctttcttcacgttctttccatcggcaagcgcggtttgtgcagcggtgccgtgggtttgttgctgcacgaaggtgaagtcgttgtagaacgccttggaacgctcggagccgccttcggcaaaggcggcggcggaggtcagggtcatcaggctggcaagcatcagggtggagagtttcatggcagtgtttccggtaagtgtgatcggtatccgctctgtccttgatcagattcatggggcgagtgtggagggagtttattaagtaggaattaacgccaaaaaaaccaaaagctaacaatttcgttaacttttggttaaaaggtcctacatcttccagtccaatgccaaggtgatcgagcgtgggtcaccccaatacacgccgttataaaaaccaacgcgctcgtaatactttttatcaaatagattgttgacgtttaacgacgccgtaacatgttcatcgaactgatagcgggacatcaggttgaccacgctgtaggcctgctgagtgatctttgcccgtgtggtgatccggttgcccttgctgtcacgagcccccgttggccggttgctgaattcgtagatatcgctctgccagttcacggcaccgccgaccgtcaggttgcgccatgcaccgggtaaacggtaggcactggagaccttcagcaggttcagcggctggccggtgttgttgcgtttgtgcgtgccattcactgagtgggtataggtgtagccggccgtgagattccagtccggcatcacttcgccggccacctccagctcgaaaccgctcaccttgttacccttgccgcctgacttgtagtactcctcgcccgttttggggttcggcagtacggagtagtcccgttcggcgacgttgtcctgcttgctccagaaataggcggccgctacgttcaagcgctcctgcagcaagctgcccttgagcccgacttcatagttgctgcccaccacgggctccaggtacttctcgttgacgtccttgaggctctgcggcttgaagatgtcggtgtagctggcgtagacggtgtactccggcgtgatgtcgtagagcagcccggcgtagggtgtccacatatcgttgtgggtctggcgggtcttgttggccctgagcaattggtcattggccgtgtattcaggcgccgcgctttccagctcccagctgccataacggctgccgagtaccgcatgcaggcgctcggtcaggctcaggcgcgtggccaggtagccagctttctgttgcttgctgctgtgctcacccttgagcccggtcacggtgtcggcgaacttgccgatcccgcccatgtatttccagtcttcgatgctgtagtagccgccggggatgctgctgcgcatcacgggcgagacgtcccgctgcgtggcctcgccataacccatcatcagttcatgttcacggcccagcagcgcatagctgccagccaggttcaggtcaatcgcctccattctcgacgtgccgcgcatatggctggcccaggcggtcatgccgctgcggtcgtcgttggggaaccccgcaccgccgtagtagaccttgccgtccgtgtcgctctggcgatgggtgtaggccgccttcaagtgccagtcgccattcaggcggtgatcgaggctggcaaaggtggtcttgtcggtcagcggccaggagctccagtgcgctgccatattggtggagcgcgacaacccagccttgccgccctggctgttccagtagggcacagtgccccaggatgtgccctgtacctttttgtcctggtaatcaaaaccgaccgccagcacggtgtcgtccgacaggtcgccttcaaggatgccgtagccgactgcccgctgcagcgcgtagttgtcacggaacgatttgctgtcgcgataggccagcactgtacgcccgcgcagcttgccgtcgtacgccaacgggccgccgacatccacgaagctgtagtagttgtcatggctgccaccgctcaccccggttttcgcctgccactgggcggtggggcgcttgcgcaccatattgaccgtggccgaggggtcacccgcaccagtggtcaagccggtagcgccgcgaaccacctcgatgcggtcgtagatgatggtgtcggaatcggacttcatgtagccgaaggtgttgagcatcccgtcaatctggaagttgttgatgccgtagccacgggaggaataggacacacggtcggagtcgttgtgctggacgttgaccccggtggtctggcgtagcacttcggtcaatgtattgagattgaaatcatccatctgctggcgagtgatcaccgagatcgattgtggggtttccttgaccgaaaggttcagccgtgtggccgtgctcatcgagccggtggtgtaggccccggtgtgctcggtggtggcgcccaggccctcggcggtgatgctggtggcccgcagctcgagggcttggtgttcggggtcggtttcagccagcaggtcggggcttgcgcccacgctgaagaggccgagggtgagcgtcatggaacgggtgaaaggcgcgaacatcgcggaagactccttgtcgtctttgcggcctttccggtcggaaaaggccttggttcaaagacgaaaggacagggggaactttaggcttaaacgagaatgattgttatctttctgttacaaggccggtttttcctgcagcaccacgtcggtcgggttggcctttttcggcttgatcaggctgaagtcgatcaggggcttttgttggcgctcgtaagggttgccaatcatccgcgggcgcggtgtgaagctgtcactcaccaggctttttgtacggtccagttcattgaagctaagaccggccagatcagcccaggtgtgaatcaactgcgagctggagtagggccgttgcaagtcaccggcgaagctccagtcgtgggtttcgcgccatttcggtgaggcataggccatgaacggaatggtgtacatcggcgctgtcggcttgccttcgttacgtcccagggtggtgtggccaatcgagtcgaagacatcttcgccatggtccgacaggtacagcaggaagccgttcggatcggtcttggcgtagtccttgatcaggcttgacaccacgaagtcgttgtacaacaccgcattgtcgtagctgttgtaggtgggtaactggtcgtcgctgatgcccgcgggcacgccctggcggtcggtgaatttgtcgaaggttggcgggtagcggtactggtagctcatgtgggtacccagcaaatgcaccacgatgaacttgcgctcggccggatcggccagggccttggaaaacggcgccagcacgtcgccatcgtattggcgggcgttctggttgcggttgttgttcaggtacacctgctcgtcggcctgttcggaaaaggtcgtgagcatggtgttgcgcttggtcatggtctgctggttggtgatccagtaggtcttgtagccggcctgtttcatcacgctgacgatggacggcgtcttcaggtacaggtcggggttttcttcgtcggcgaaggtcagcacctgttgcaacgcctcgatggtgtaggggcgcggggtgatgacgttgtcgaacaccgccagttggtcacgcagtttgtccagctccggcgtggtgttgcgcgggtagccgtagaggctcatgcgctggcggttggtggactcgccgatcaccagcaccagggtcgacggttggccggccatggtgtccttgaggttggtcaggggcgggatctggctggcgctgtcgagcatgccttgcatgttgtccagttgctcggtgtagcggcggtaggcgacgatcatctgccacggcacggccggttcgatacgggtttcaaagcgatcgatggcctgttccatgttgtcgctggtggcgatctgcttgaccagcggataacccaccaccgccagcacaatcgctgccgccgccagcatcgactggccgcgaggcaggtagaccgggcgcagccgcgtccacaggaagacggcgaaggcggtatgggcgatgaacgccaacacgatccaccaggcaaaatactgggtggcgtattcgccggcttccgagatgttcgactcgaacatgatgaagatgacgctttgggagaattcctgctggtagatgaagaaataacccaggctggccatggaacacgcccacagcaccacgccgatcaaggcggcgagcagtcgtgtacggcgggggaacagcagcatgggcgcaagccacagtgcactcatgaagaaggcttggcgaaaaccactgaaaccggaagtcccagtcaactggatcagcagttgggtaatgcccgagaagtaccagaaaaacaggaacagccagccaaggccggcccaatcaaagcctttcgcagacgtggtgctgcgtttgaacatcgccatccagcgctccaacccgttgatgtttcagttgacgcgcagtgctgcacgcaacagaagccacccttgcatggggtggcccttgggggctggagtatcgggagaggcatgtgaaaactttgtgagatttttgtagcggttatcttacaaagcgatgacggggctcagcagagcgcgggttgtgcaccggcgggctggtccaattgggcctggatgatatgggcacgcaggcgcaggacttcctgctgcagctgttcgcgctcgtctttcaactggcgcaactcgtcgcgacggatagtgacgtagagggtctgtggcggacgtgtcatctgtgcagtgctcattgcttacctcgcaaatagccggtgtgtcgcggtgtgccagaacgcttgagtcgaggttctcggcagcagtcagggcaattctgaattctttttgcaggcaatggaacttttttatttttgatggtcgtgtgactttttgtgccgtgatgctgaaacgatggcaacttttttccatgaaactagcggtatccgcgctggactaaccctcattagccgcattgcgctataaactatgtcacacattttttagtagttaggagcatcagcacatgcaactggggattatcggactaggccgcatgggcgggaatattgcacggcgcctgatgctcaatgggcataccaccgttgtttacgaccgtaacgaagcatttgtaaaaggcctgagcgaagagggcgccaccggcgtttccgacctcaaggccctggtttccgggctgcaaaagccacgcaccgtgtgggtcatgttgccggcgggcgcgcccaccgaagacaccatcaacgaattgagtacgctgctggaagacggtgatgcaatcatcgacggtggcaacaccaactataaggacgacgtgcgccgggccaaggccctggcggcaaagggcctgcactatgtcgacgtcggcacctcaggcggcgtctggggcctggagcgcggctattgcatgatgatcggtggcgacgccgagaccgtgcagcgccttgaccctatcttcaagagcctggccccgggccttggcaatatcccgcgtaccaaggaccgttccgccagcgccgacccgcgtgccgagcagggttacatccacgcaggccctgccggttccgggcacttcgtgaagatgatccacaatggcatcgagtacgggatgatgcaggcgtttgccgaagggttcgacatcctcaagaccaagaattcggaaaacctgcccgaagaccagcgtttcgacctcaacgtcgctgacatcgccgaagtctggcgccgtggcagtgtggtctcgtcctggctgctggacctgaccgccgacgccctggccaccgacccgaagctcgacggctactcaggctcggtggccgacagtggcgaaggccgctggaccatcgaagccgccttggaacaagccgtgccggtgccagtactgtccacttcgctgttcgcccgcttccgttcgcgccagcagagcacttacggtgacaaaatgctctctgccatgcgcttcggctttggtggtcacgtggagacttccaaaaaatgaccgccaacggcaagaaacccaaggccgaacccgctccgcccaccaccctgtttctgtttggtgcccatggtgatcttgtcaagcgcctgctgatgccggcgctgtacaacctcagccgtgatggcctgctgggcgatggcttgcgcattgtcggcgtggatcacaatgcgatcagcgacgccgacttcgccaagaaactcgaagacttcatccgcaccgaagcggcgagcaaggtcaagggcaatgccgataacgctctcgacccagcgttgtgggcgcaactggccaagggcatcagctacgtcgagggcgacttcctcgacgacagcacctacgccgacatcggccagaagattgccgacagtggcaccggcaacgcggtattctacctggccaccgcgccgcgtttcttcagtgaagtggtgcaacgcctgggcagtgccggcctgctgacggaaaccgacgacagcttccggcgcgtggtcatcgagaagcccttcggctccgacctggccaccgccgaggcgctgaacgccagcctgctcaaggtgatgagcgagaagcagatctaccgtattgaccattacctgggcaaggaaacggtgcagaacatcctgatcagccgtttctccaacgtgctgttcgaggcgttctggaacaaccattacatcgaccacgtgcaaatcaccgccgccgagaccgtcggcgttgaaacccggggcaatttcttcgaaaaaaccggcaccctgcgcgacatggtgcccaaccacctgttccagttgctggcgatggtggccatggagccgcccgcagcctttggtgccgacgccgtacgtggtgaaaaagccaaggtgatcggtgccgtgcggccctggtccctggaggatgcgcgggccaattcggtacgcgggcagtacaccgccggtgaaatcggtggcaagtcactgccgggctaccgtgaagaacccaacgtagcgcctgacagcagcaccgagaccttcgtcgccctgaaggtaatgatcgacaactggcgctgggtcggcgtgccgttctacctgcgcaccggcaagcgcatgagcgtgcgcgacaccgaaatcgtgatctgcttcaagccagcaccctatgcgcagttccgtgacaccgaggtcgacgagctcaagcccacctaccttaaaatccagatccagccgaatgaaggcatgtggttcgatttgctggcgaaaaagcccgggccgaccctggacatggccaatatccagttgggttttgcctacaaggacttcttcgaaatgcagccgtcgaccgggtacgaaaccctgatctacgactgcatgaccggcgaccagaccttgttccagcgtgccgacaacatcgagaacggctggcgtgcggtgcagcccttcctggatgcgtggaaggaagacgacggcatccaggcctacaaggccggtgaagacggcccggctgccgccgacgcgttgctggcccgtgatggccgcacgtggcacagcctcggatgagtgatgcagcgattcaccccatccgttttatcctcagtgacgtggacggcaccttgctgcacccggaccaccacctcagccagcgcaccgccgacgcggtgcgtgcgctgcgtgacgccggggtgtttttcagcctggccagcgggcgtccgcccaaggccatgctgcatctgatcgaaacgttcggtatcgatgtgccggtggcgggcttcaacggcggtacgctgatcaacccggatggcagcatcctggttgcccaccatttgccggcggaagcggcgctggtcaccctggcgctgttttcaggcgagccggacgtggaagtgtgggtgtttgccgacggtgactggctgcgtcgcgatccgcccgggccgatggtgcagcgcgaagctgatggcctgggctacgggccggtggtggtagagagtttcgagccctacctggatcggatcgacaagatcgtcgcggcgagcaacaacacccagcggctggtcgagctggaagcgcagttgcaacccaaggtacaggggctggcacacgtgtcgcgctcacaaccggtttatctggatgtgacggcgatgttggccaacaagggtgaagccctgaagaccctggctgcacacctgggcataccactggagcagaccgcggcgatcggcgatggtggcaatgacccggcgatgtttgaggtggccgggttgtcgattgccatggggcaggcggaggaaaccgtcaagcgtcaagccagtgtggtcaccggcagtaacctcgaggatggcgccgccgaggcgatcgagcggtttatcctggccggctgcaacatacgctagacagttacagcgataaggcaatgcagtacgccaacaatggacgctgaattctgcgccccacacctcggggcgttgactttgccgcatggccttcatgtcaggaggttgccttgcgggtgatggtacgtctgttgattctggagttcgaggtgcgtgaaaagtccacgagccggtcgctgcacggatatcgattaccactttatccgtggacacctcaaacgctatgccgagcgcaacatcggctacgcgaagttaaaggactacgcctctaaccgagaacttctgatcaatgttctgcgctcgaacattgatcacgaagttgccgaaacggtgttctttagcgaagacgtcagctcaacggtgcgctgagttacttcggcatggcccaggcttgcaactgatagccgctcttgtccaactcggcacgcgcctgcaacagcaagtcttcaagttgtgcggggttggaataagtgcgcgcatccagttgccggctgccgatacgggtattggtgcggtcgatgacgctcaggctcagggcgccattgccgtcatgccaggccacgcactgaaagggttggaaagcacggtctgcgatcaaaagagcttcgttgatgcggagcggggcgttcatgtgggtcgtctctctaaatgcccattcaagtgattgccggcggttgggctgaccgtgcggcgggttacttgtactgatgcacgatggcggggtacgggtcacatgttagagcaactattttaaacttttagtgattgacgtcatgtaagcggctgttttgaaagctgaatgaaagtttcggcatagcccaacttttcggcaaaggcgcgcagaagtggctttttgccccgacttatagcgaaacggtacaagcggtgcgtcaagaccttgctagtgttagccgcaggcgtcacaaaccgttgtttctaaataactttaacaattttgacgccaaggaacagtcatgggtgtgccccccgttcaacgtcggttgctagtggttgatccctgtgacgattgccacgacctgctgcccggtttgcgcacggccggctgggcggtcgacagttgcccattggaggcggttggcgagcggtcctgcgatgttggcctgttacgcttgcaaccctcccacttggagcgccccgaagcggtcaaggagttgatcggccgcagcggcaccgagtggattgccgtcctcagcccggatgtactgcgcctgcagaacgtgggtgattttgtctgcgagtggtttttcgacttccacaccttgcccttcgacgtggcccgggtgcaggtcaccctgggccgtgccttcggcatggcgcgcctgcgcggcaagggccacaccctggtggatgagccggagcatgagctgctgggtgacagccgggcaatccgtgagctgcgcaaactactatcaaagctggcgcccaccgaatcaccggtgttgatccgtggtgacagcggcacgggtaaagagctggtggccaagacgttgcatcgtcaatcccagcggcatgccaagccctttgttgcgatcaactgcggggcgatcccggaacacctgatccaatccgagttgttcggccatgaaaagggcgcgtttaccggcgcccatcagcgcaaggtcgggcgcattgaagcggctcacggcggcacgctgttcctggatgagatcggcgatttgccgatggagctgcaagccaacctgctgcgcttccttcaagaaaaacagatcgagcgcgtcggcggcagccagcccattcccgtggatgtgcgggtgttggccgcgacccacgtcgacctggaggccgcagtcgaaaggggcgcttttcgcgaagacttgtattaccggctcaacgtcctgcaagtggtgacggcgccgttgcgtgagcgtcatggtgacgtggcgatgctggccaaccacttttcgcgcttttacagccaggagacgggtcgccgcccacgcagtttcagcgagagcgccctggtggcgatggcaaaacacggttggccgggcaatgtgcgcgagctggccaaccgcgtgcgccgtggcctggtgctggctgaagggcgccagatcgaggccgttgatctgggattgcaggctgaacaggcaatttcgccgccgatggctacactggaagactacaagcaccgcgccgaacgccaggcgctgtgcgatgtgctcgaccggcacagcgacaacctgagtgtcgcggcccgtgtgctgggggtttcccggccgacgttctaccggttgctgcacaaacaccagatccgctagggcgggtaaaccgaaaagccccgcaacgacccttatcgttgcggggcttttccttgtgtgctgtagcgagcgggctcgccgtggtaaggcggcttgctgtggcgagcgggcttgccccgcgttgggctgcgaagcagcccccccggctctccctaaaagtaatacggaaacttcaagctaaacgtaaaatccggcgcatcatccgtcatcccgatcgccaggttcggcacgatcgtcaggttatccgacgccgcaatggtcatgcccacgttgaagtaaccggcgttggcatcgctggacaccaccgactgccaatccccaccgttaggcttgagcttgctcttgcgttgcaccaggtcggagaccgagaacgacatactcatcttctcgttcagggcgaacgccacgcccacaccgaattggaagctgtcgcccaggctgaccttgccgccgactttctggttgacgtcgctgctgatgtcgtcaaacgactcttgaaagttgtgggtgtaggagaacgaaccaaacagcaccgcagggtcgaacgtcttgaccagcgagatacctggcgtaaccgaccacacgccattaccggtgggcaggttttccggcacatacaggttgtcgttggcggttgacctgaccagcttgatgccaaacggttctttacccgttggcgccttgacgcgcagcgacaccaccgcatccggcagggtgggggtttcgtcgaggaacttgtaggccaccccgaagttgacgtcgccgatggtcgggtcacggctcacggattcttccgaggtggcgttggcgttgttgccggcgccgccggactgataagtcgactcgcggtaaaccaccggcacgttcacatcgaactgccaacggttatcgacgttgtaacgccccgtcaggtccagggtccagttgtccgacttgattcggtccaggttgatattacccaggaagatcgagtccagcgccaggaagccgttgagcgtgagctggcgcgcatcgtaacgcgcatacgtgatcccggtttcaaagctgaatttgccgttaccgaagaagccgctggcctcgttatagaggttgctcacgctttgcgcaggcgctgaatcgtccttgagcgactgcccataggaactgccgccgcctgcaccgccggatgccgctgccgctcccgtgccagccaccgtggcaccgctggctttctgaaagtccgccggggatttggccaggcgtttgggtgctggcgtcgccggcgtgtcctcgacctggcgcacccgttgctccaacaccgccagggctttttgctgcacttcgtaccgctgcttgagctccagaagttcctgtttgagggtctcgatatcggcgtctggcgcggcatacaacatggatgcgggcaagagcgtacttaaacagaccaccgcacgtagcgataacgatcgatgcatgaaataagccgtccttttctaatgcgaaagtgtcgagggtcagcgtagttcaataaccgagagtgcgtaggcctttgagttgatccaggttgcagttcaacgcggggttgttcaatccgttattcattaccacgttgagctgggtcatgttgttgacgaagttgttgttgccggtcagtaccgtgccttgcagcacctggccgccaccaatctgctggaggctgttgccttggttatgattggcctggatcgccatctgcaagccgccattgttggccgagacgctcacccggcctgccgcgctgtcgccggtgaccgtaccgccggccaccagcacctgccccgattgcgcggcattggaaggcgcaaagccgttttcagtgaggttgatcccgacattgttgtaggcggtgtttttgtcgccggcagcgcgcacgctctgggtcacgcctgtgccggtgcccaggccggcgcctccggtgacgttaccggtgccggtgctcgggttggtgccattcccggtcgaaccggtggtctgcacgtagaactgtggcgtaatggtcgatgagtcgacttgcatgctggccttgccggtgagggtgtcgcccacggcattggtccaggtgctgctcatgacaataccgaagctgatgatccgccccggcatcacataacggccgcgcaactcggccatttccgaatccttgagttcgatcggcttgaatgccgatgaagcataagcgggcattgaggctgccagacacaagaccgtcagccaacgggaagtgttcatctgctgctcctggagcgtcctgccccttattgcgcttcttagaagaagtcgctctggatgaaaccgaaatccatcagctcggcatcttttacaggatggaatttgtccagctggttcttcgcggtgagcggtgtgggcgggtcgagcaaggcattggccttgtcgtagccttcacccagcacggcgaacacgatgccgttccaacccttgacgaagtcgtcgcgcgaatagcgcttgtggcccagcaccgggtcgccgatatagacccagtccttgtcggcgcgctgcaacaccacgaagtgcttgtagccacgaatctccagcagcaccaccacggggattttcacggtcaccagggtgtccggcgaaatcttgtagccccgggcccgcatgccgatgctttcgaggtagcgcttcatgtccagcatggaaaaaccctgggtgcgaaccaggtcctggtctgcattgaccagcatgcctttgatcacgtggtcttcgtcgacgtcgagccaatagccctggcgcaggatggtggcgagtgccgcggcaccgcagctgaaatcggttttctgttccaccaggttggcgaagcggcgttcgcggatgctctcgaccttcttgtagatgactgcaccgccaggcatggcggaaatcgccatggtgcctgcccaggtcgggccggtgagcagcatcaagagggtgagggtcgcgaggcgcatgatcgtctgacctaatggacactggaataaaaaagggccttgttgccaaggccccgttggatcagaagcgcacgccgctgctgcaaacgctgcagccttggcctacagacaggctgttgctgccttggttgccagcgccggattgcaggttcacaccgatgttgccggagttgttgttgatcgagttatcggcactggcgttgttcgacacatattgaggtttgccgccgtgatggccgtacccggtagcggcggtattgaggtagttgttggcgagcgagttttgttcggtattggcagccgctgcgatgtttttgccatcagccgtggtgattgccaggttgtttttaccctggttgccttgaccggcttgaccgttgtaacccacgttgccggagttacggttcacggagttatccagggaggcgttgttctgggtgcctttgttgacgaagttgttcagtgcgctgttttgattcacatcgaccacagcgaacacagttgcaaagtcgcctttggcgctggagatggcgccagagttatcggcctggttgccactgccggcctgaatgttgacgccggcgttaccgctgttgccgtttaccgaattatcggcagaggcgttgttttcggtcttggtgtcgtcgtatttgttgccaatgctgttttgcacatcggtcacgacagaggcaaccacgccagttggttgaggcgctggatgccagccaccgccacctgcttgagctgcagcagccatgagtgcggcgagcgcgaaaaccattggtttcagagccatttgaggtttcatggtgtttctccttgcttctaattagttggttaagtgttggtacggtctagctagtgctaccaagctgttacttgatagtgatgcccagggtgttagccactcggttccccaccccggcactctggttcacctgtatcactcctcggctgccggtgaaggcctggtcgcttgtcacgacctggcggctgccagtggtgggggtgagccctgagtcggttgccagcgtcgtcgtgttctgttgcaacaggacgctgtcgtcgatggcttgcgggccaggattgacgctgatccgcacggcattgactaattggttattggccccggcggactggttgacgcccaacatgccgttgccattggtaaaagaagtgccctcgatcgccgccttggcgttcagggcaggatcgaccttgccgtccatcctctggatattgccggtggtggcctggccgcccagcgtgacagcgcggttgttcgccgtttgctgctggttgcccgccgcctggttgatcatcaggttgccggtgtagtccttgccgctgttgttgatcacggcgttgttgtcggccatcgccacggcgctgcccagcagggccagaatgaacagggagcgtttcatggtttgccccccagcatgccgcccaaattgttcaggggcgccatgccgcgctgaatcgaatcgctgatctgcccacccatgctgccgctgccgcccgagcggctggctgctgcgcctgcgcccagcgtggacatgccgttttgcgtggcactcaagccggtgaggttgctgttgggctggagggcggtgcgagtgatgcccaggccactgctgacgccgccgaagtcacggtcgctcaactcgcccgacagggcgctgttgatttctcggctgggattggcgttggcggtctgggggtaaggatccgggccaaaggaggagcggccatacatatgaccctgtacgtcgcggcccgtcacgatcacaccatcacctgccagggctggaagactgatactggcgctgagtacacagctggccagcagtacgttcatcgaaccttgagtgagtgtgatcacggcggcattccttattcttcacgctgaccctaaacagcgttgtcagggaaagagcagaacccgtgccgcttttgatttattactgtttttcaaaggcttgcgataactgcaaggcaaaatgatggccttgctgtatcagcggtgagacaaccgccctcgaaggcccggctatccatccactgcacaaccgcttcaccccgttgtatcagcgctgtaacaccgtgcatgacgaaacgatgaatccgctgtgcacgggcgatccagggacggtgtgtgtaaaaaaaatggacagtgcgggcgcaacgaagccaaaagcacgacgcaacaggctcagcctttgggggctttacgcggaatggaattgaggacgggattgccgtcctggttctgggtcaggtagaccggcaaaaccttgggcagggaggggatgaggttgctgacctcgttgatgttgtagatgccaccgatgcgaatcgccccggtgctggcgtcggccagcatcgccggtttgctgaggtagcggttgatcagcggcaacgcatcggccagggccaggttgtcgaggatcagcttgccttggcgccaggccagggccgagtcattcgggctgatcgcacgcacgctcggtgtggcatcgccctgttgatagctggcctgcatgccgggggtgaggggtacgctgccgtgcacctggtcgctgctgatctgcaccgagccttcaagcagcatcacccgcacttggtcttcatacttccagacgttgaactgggtacccgtcacgcgcacctggcccgcgccggcgtgcacgacaaacgggtgcgcactgtcatggctgaccttgaagaacgcctcgcccttgttcagggtgacgcggcgctggtccttgtagttgctgtagaccagctcggtgcccaggttgagctccacctggctgccgtcgccgagcgtcacttggcgcaggccgctggcagcatcgtagcgctcataggaactcggcagccaaccggcttgccagccggtaaaggcggcgaggggcagggcggccaggcagatagccgctgccaccgcataggtgcgcaaacggctgcgcggtttgaatggcaccaccaccggcgctgtgtcgctgcgcggcaggtggtcggcgacgtcccagatctccagcatcgccgcgtattcaaaggcgtgcagggggtgcgaatcatgccactgggcaaaggcctgacgttcgccgggcgtgcaatcgctcgcatgcaggcgcatgcaccaatgcgcggcggcgtcggtgatagcgtcatattcggcttctgaaagggctttttcgctcattaactcgtcctgatttcgcacattctaacctcctgggagggacggcgagaacagccatcatggcgattgcacatcaattggaacttattctcgtttggatgcgcctaaaaatttcaggacacgtgtcagtcattaccaccaatggagtacgaaaatgctgaagaaaacattaatcgccctgtgtgcaacctccgcattgctcagcgccggcgccgccatggccgaccgcccgggagccggttggatcaccattgaaaaagccatcgaggtggccaagaccaaggccggttatgtcgaggtttatgccgccgaagccgatgataacggctactgggaggtcaagggtcgcaagtcggatggcgtggtgtacgaagcccgcatagatggggcttcgggcaacgtcattcgcgatcagaaagactgatatccacccgggggctgctcaggctcccgggtccagttctcgacccaggtgagtgatcatgtaggcgattgaatcggcgttggccaggatgatgttgatgcgtttgctgtcgtcactcatgaatacctggcgcgcatcgtcgagtgtcttggcgccggtgatgttcaacacccgggtgcgtgcggtccgggaggcgtggcgcctgcccagttcttcgaattgctgcgcgtaatcgtcccagaccttgaacaagatgacgccgggtgtctgggtagacagggcgttcaagcgcaagtgatccagttcggcatggagttgcctgccacgcggggattgcacattgatcaggtcggtaaacggccgcatgctgtccaggtaggccaagtcttcagagtcagacaccaagtgggtcaactcgtggatcaaggtcgtggcgcgtgcgtgggccatgatgttgaaaggggcattcaagcggttctggtacatgtccagatcgggggcaaaaaaacggtcgagcaaatagatttttttgtcgatgtcgttgggcagggtgaaggcaatcaggtgttccgggctgtagcgcgcggtccccgtgacaaagcgtatcgagtcaggattgatcaacgtggggttcaccagttcgttcaacacctcatcgatccgtgtttccactttgccgacgtgatcgggcgtcaaggcatgaaccccgaacagctcggtaaaaaagcggcccaaccggctcagcgggtcgcgcgtgagcgcgaagttgaggatgttgcgtttgcaggtcaccgtgtagtacgtggcgacgttgagcgcctcgttgatgcactgggctttccaactggacagtgcggcgatctgcgtcatgccgaccgcttcgatattgatcgagccccattcccctatgcgagtcgcggcccggccggcaaaccgcgacatcgatttgccgaaacgaggatcacggtttcgcaaatccagcacccattgattggacggcgtaagcgccagcccaggccctgactcttcatcgcggtggatacgccagtgggtaccggcgtttcgcgccgggtagactttgcctgccaccggcacgtagtcccggccagtgtccacatcgtgatagacctgggtcttggggtcgtgtctcaggtccgtcagggcgacttcgtgttgttcgaacgcctgcaggtgggtgcgctgcggggcggtgatatccagcgtggcgagggtggtagtcgcagaggcctgcgtccagtcattgtcatcaaaggtggtcgcaggttcactgtccgggtacagccggttgagcgccttgcgcaaggacgccaattcggccacgccgccgacaaaggtcctgagtgcctcgccccagcgatgttgttgcaagtgttcactcgaggccttgaacagcttgtagctgcgccacaccaccaatgggtacgcgagcttgccggccatgaaggtcagcgcattcggaacccccttgtgcagcaggcgaccgaccactccccattgcgccgcgccttgcttgtcgaattgacaggcgagcattttcgtcagcagtacgacgttgtccttgaacaggcgcatgagaatattgcccaggatgggagcagaccccaaccgaatgtccgccgtgtcgcgccgatgctgcgccagcaggtttcgataggtggcctggtggggtgggtccaactgttggagaacccattcctgcaagtgccctggggtggtgagttcactcagcaagtcttcttcccgagcgtactcgcgcagtacatggtgcgggctgtagggcgcgtataacacccaggggcctgtggcattggtctgcggcccgatcaggtagacaccctgcacgtcggccactgaagcgccggctgtggcaaccagttgcaaggggcgaatgcacgctgtcacgccactgacttgcgcacgggcgaccgcgtcgggcatgtcgaagacctgctggataaacccccaggccgtggcggaaatccgttcttcgagtttttcctcatgggcgtattgcagcaactgccagggcagctgccggcagtagcgttgccggcgtgtgtgcgcgtcgttgtccgtggccagcagatgggtggtcagccacgtctgatacaccgatttgaggtccaactgctgcaccatttgcaccactgctgtgccgtccagcgtcgcgggcaagggtgtcgcggtgcgcgagcgtgggtggatttcatcggcctgcaggtcgggcaggtgacgctgggcaaagtcggtcaggctctgggtgttgccgttcagcgccttgcggatcgggaccaggatgttgtcggggtgcagtcccaggcctgggaaacgtgcttccagcagcgtgaccaatgcagcgctgacctgctcgttcagtggtgtgattccgtgcaggtaatcctgttcatccggtgcactgacgcgatattgctcgagcaattcggcgtgcaggatctgctcatcgggcgccgccatccccagccatacggggagtgcctgctggttggccatggcccgtgccagttgcatggccctgggcaggttggtgggcacggcctgctgcatcaccacgtccagatagtcctgcaggcgccgcgcccccaggttcatcgccagcaccgtatcgacgttatcggtgagggtttcggtatggctttgcaggcggttgtccagcaggtcgtcgtcgatacgttgcagtgggccgagggtgtaggcctggtgcggcgtgcgcaggcgattcggcaggttttccaggaagggcaggcgttggatggggtcttgcaggcgtttttgcaaggtttcgcgcaggtgctgtatggagttgaacacttcatgaccgcggcggggcgtccacagcaccgcctggccggagcgctgcgggtcggtgccgccgcgttcggtcagcaccaggcagttggccaacggctgcgcgggtgaagcggcgtcaaccatcagcgtcaacccgtaggcgtccggcaggaagccattcaaggcgtggcgcttcacccgcgtcaggctgtcggtgcgcaatacggtgtcgagcatttcctggccgcgctgcctgagggtgttgtccaaccggcgcagttctgcctcgctgcgcagcccgagcatcagggcgtgccgcaggtgagcgcgatgactgttgaggaacatctgcgggagtgggcgtacatcatggttggcgaatgtcaccatcgcgctgtcgatgattgtgttgaaggttgtcgtggtcaggctgttcaactgtttagcgataccgctgcggggtgcgctgtagaacccgacagtggtcgattcggggaccgaaacggcttcatgcgccaggcgctcgatgaagtgctcgaccatattcaatgagcgcagaggagcacgttcttcgcgctgttgtgcggcggtcgcgtaggtattgatattcacctcttcggccatcaaaggaagttggtgtttatccagctccgcattcagcgcatgggctgccaaccgtctgagtgtcggatgcgccgcacggtccgaggccagtgcctgttcaactgtgttcaactgctgccattgttgtttggcgcgttcggcctgcaccgtggacgggcgtccattgctgctggtgatggggtgcaggctccagcgcccgccggcgtccagcgtgtgcaggcgatggtcgatcaggccgcgtacatccagggcacagtccagcagcgcttccaggtttacctggccgtcgctgcgacggtacaggcccagggcgtattccatgttgctcagttgcttggccgcaatgtctttggccagttcggtaaagatgtcgccgttgatgggcaccccgatgatctgcagcgggtcaaggccgagcagcacattgcgttcatccagggacaggaaattgagtaactcgtcctcatgcccgctggccttgagcatgctgatcaaggtggcgttcagatcctccatgttcttgagcacctgcaagccgcgggtctgggtgtacaggtaggcgtggctattgctgatcatcagtgtgccagccaggtcgacatagtgctgggagggcgcgctgacgcggatcttttcgacgcgcaggttctcggcatgggcggtgcgcgctgccgcgtccgggagaaacatggccagcaactgctggctgtcttcggcgctcaggatgccttgttggcgcttgagcagcagctcggcacggaacgtgtcgctgagggtctgggccactagctccaggcgggagtggccgtccttgatgtcttcgttccagtaggtctgcaacaagctgccgagcagcttcgacaggattcccgctgtctgctccaccacgctttcccagcgacgctggtcctgggccacctgtgtcggcgtccagcccgaagtgacctgtttgggatgggtaaaggtgcgcgtctgcccgatgggccaggactgtttcaagtaatagtggagcaaggcctcgctcaacggcacggaggccagccattgcgggtcggcagtaggcgctatgtcactgagcgcaaagctgttcatgcgtgtatcgcggtgatcgaggctggggaagtaggcgcgcgccatgacggccagggacgtgtcgagcatcgttggcagcccgggaatacgacgcaattggtcgagcatgccctgcacgttgtgcaattgggcgtgctggatcgcctgctcctgatgttgcatcaccgggccttcaatggcctgtgccgccacggtcggtgctttggcagcgtccagggttgcgcgctgggcaatcgacagcaagcgcagcaagtcggcgcggcgtgagcggtccttcaggcgctcggtgatctcggtgagcacgtcggcgcggctgtcgaacacttccaggccgtcatagggcgtatagagcagtgccttttgcccgtcggggctggggctcatgatgaacgcgtcggcgagggggatgtccggtttctggttgatctgcagcagcaggctttccacgaccataggcgcttcctggtgcaccgggtttcggcgtgcgtggtcggtcgcgtaatacaggcgatgcagccagtccaggtccttgacggtcaaccccagcgcacgttctcgcggtgtgggttcgtctcgttttatgggcagcaggaattcatcgaagaagtagggaggggtgacccgggccattgcatactcaccgtcattgtatgaaggcctcagggtaaggagggccggttcgggctcggcggtaaataagtgcagcggtgggggctgatgcacaaacagacgttgacagcatgcgcgggccgcgttgtttaatcgtgggcctggatttcacgctggttgccccttccaatcataaaatcggagcttcagatgtcacaggtccatgagcaggctacggcccgcatcggctttaccgaactggtggcgttgcttcatcaggtcttcgtgaaccatggcacctcccccgaggtggccgcgatcctggcgcgcaactgcgcctgtgccgagcgcgatggcgcccatagccatggggtgttccgtattcccggttacctcagcaccctggccagcggctgggtggatggcaaggcggtgccggtggtcacggatgtcgcctcagggtttgttcgcgtggacgcagccaacggctttgcgcaaccggcgctcgaagccgcccgcgcgctgttggtggagaaagcccgcagtgctggcattgcgctgatggcgatccacaactcccaccatttcgccgccctgtggccggatgtcgagccgttcgccgaagaaggcctggtggccctgagcgtggtcaacagcatgacctgcgtggtgccccatggcgccgaccgcccgttgttcggcaccaaccccatcgcctttgccgcacctcgcgccgatggcatgccgattgtgtttgacctggccaccagcgctatcgcccatggcgatgtgcagatcgccgcgcgcaaaggcgagcgcctgccgccgggcatgggcgtcgacagcctgggccagccgacccaggaccccaaggcgatcctggaaggcggtgcactcctgccatttggcgggcacaaagggtcggcgttgtcgatgatggtcgaactgctggctgcggcgttgaccggcggcaatttttccttcgaattcaattgggccgatcatccgggggcgcgtacaccctggaccggcgaactattgatcgtgatcgacccgagcaagaccgccgggcaagcgttcgccgagcgcagccaggagctggtgcggcagatgcatgcggtggggttgcggcgtttaccgggggatcggcgccatcgcacacgggcgaagtcgcaggagcaggggatcgagatcgatcgcaaagagctggaacaattgcgggagatcgcgggactttaaacagggctgcgccgctggcgcagcccatcttgcttacttagttgcggcgaccgagcagcaggccgaccaccaggccaaaacctgcggaaatcgccacggtctgccatgggtggccaccgatgtaggtctcggtggcgtccaccaccggcttgctgcgttcgcgcacattggacaccgagtccagggcttgcttgagcttgatggcgacctgctcacgcagggtttcgccttcttcgccgaccagggcggcgctgcttttgagcagtttgtccgattcttcgatcagcgcggtcagttcgctgaaggcttggtccttgatttggtcttcgacggcttgggcagcggttttgcgggccattgtgtgactccttgcgagtgaatgtggcagtgaacaatggagtgtcggccagcggcaaaagttgcagtttttttgccgctgcctgttcttgagcaaaatccggatcaggaaatttcgacctacagtgtaagatgtcacctatttgtgcagcaggtaattcaacatgagcttcaatctcgccaacaagaccctcgccgaacgcgccgagctggaagatgaaaagtcccgcctctacgacctgtggcaaaccaacctgggcaaggccaagggcgaagccgcacgcttgttcggtgagcgcgccaagcgcaagggcaagtgggccgaatgggtccgcgcagagctcgacggcatgtcgccgccggagttctccaacatggtgcgcagcgaagtcaacaagctgatggcggccaacaagtaaagctcgccacgatcgcttcacgcactttcagcaacaacggatcaagctgcgcctgggtacgccagcccagctccaccgggtagcgcggcagtaccagcgggcagggcaacacgcgcaggccggtcatctctgcaatggcctgggccgcatgccccggaattgtggctaccgcttggctgcccttgagcaaaaacggtagcgcggcaaagtggctggtcgacgcgcacacctggcggctcaggccctgcgccgccaggccttcatcggtgatgccgataaacccgcctgacgacaccagaatgtgctcgcgcgtgacgaactcgtccaggctgatgtgtgcctggtccgaatccaccaggcagcgataatcaccttcccccagcacctggcggctcagcctgccctgggcaaaaccgccggcggtaattgccaggtccagtgtgcggtcgagcagggcaccggcgacgatctggctgtgggtctgacggaaaatcactcgcagtttgggcgcacgctgtgcaatcgcgtcgatcagtcgacggccgtaggccagctcgaaatcatcggataacccaagcaccaccgagcggccctgatactgctggttatccggattgaccattgccaggctctgccgacagcggtccagcgcctcactgatcaccggcttcaactggttggcccgcaacgtcggcgccaggccgcgcccggtacgcacgaacaattgatcgccatacacctcgcgcaagcgccgcaaacctgcactgatcgccgattgcgtgacgcccaggcgcaaggctgcgcgactggcgctggactcgtcgtgcagggcttcgaaggttttcagcaggttgagatcgacctgggcgatattcatctggctcatatcattcagcactgaagtgggctttattcatgatcgaggctggcgggagaatgggcaaccccccctttatttggagtgatcgtgatgcctgtttctactgtggcagccctgcaaatcggttccttgcccggcggcaagggtgaaaccctggcgcaaatcctgagttatgaggaccagatcctgcgcagcggcgcgcaattggtggtgatgcctgaagcgctgctgggtggctaccccaagggcgaggcgttcggcacacagttgggttaccgcctgccggaaggccgcgaagccttcgcccgttacgttgccaatgccatcgatgtaccgggcgcggaaaccgaggcgctggccggcctgtcggcgcgtaccggggccagcctggtgctcggtgtgatcgagcgcagtggcagcaccctgtattgcaccgtgctgtacttcgagccggcgggcggcctggtggccaagcaccgcaagctgatgcccaccggtaccgaacggctgatctggggtaagggcgatggctcgacgctgccggtgatcgacacagcggtgggccgcatcggtggcgcagtgtgttgggaaaacatgatgcctctgctgcgcacggcgatgtatgccaagggcgtggaagtgtggtgcgcgccgacggtggatgagcgtgagatgtggcaggtgagcatgcgtcatgtggcgcatgaagggcgttgctttgtggtcagcgcgtgccaggtccaggcctcgcctgaggcgttgggtatcgaggtggccaactggccttcagaccgccctttgattgcgggcggcagtgtgattgtcgggccgatgggcgacattctcgccgggccgttgctgggagaagccgggctgctgacggcccgcattgataccgatgagctggtgcgcgcgcggtacgactatgacgtggtggggcattacgcccggccggatgtcttcgagttgacggtggacgaacgcgccaagcctggcgtgcgctacatcaccgactgagcacaaccttgtggcaagccgtgtcaattaccaggtggcggtattgggcaggttcagcgtgccacggtccacaaagcgcatcgtgccgaacagcccacccgccagtttgcctcgcagcacgtagggcaggttgttcaggctctgggtctggctcaggcccagggtctgacgcaacacggagaacgccgaaacactcaccgggaccatcaggacggtctcggagaaacgcgggatggagccgctctggtcacttacccctgatgccaacggccggccattgacctccaggtccagggccacgccgttgtagtcgatcgccgtttcattggggttctgcacccgcagcttcacggcgaagcgcacttccaggtcctggctttgcagcggctcgatgccgaccacattgatgttcaccggatcacggttggggaacagcgcacaggcgctcaagctcagcagcaacagcgatagaaccatgagcctgcgcatacaaaggtgctcctatttcgtgacgtccgggtcctgcatcactttgagggtagaggactccggatcaaattcatcttcttccagctctatgaactcttccggcaggaaaatgttcagcaggattgcacagaaagcgcccacggtgatcggcgactcgaagatgttgtgcagcgccttgggcagctcgcgcaatacttccggcaccgcggcgacgcccaggcccataccgagggagatcgccacgatcagcacattgcgccggtgcaacccggcttcggcaaggatcttgatcccggccacggccacggtgccgaacatgatcagtgtggcgccgcccaacaccggtttgggcatcagttgcagtaccgcgccgatcatcgggaacagccccagcagcaccagcagcccggcgataaagtacgccacgtagcggctggccacgccggtcaactggatcacgccgttgttctgggcgaaggtcaccatcggcaggctgttgaaggtggcggccatcgccgagttgaggccgtcggccagtaggccggacttgatgcgcttgatgtacagcgggcccttgaccggctgttgggaaatcatcgagttggccgtcaggtcgccggctgcttccagcggcgaaatcaggaagatcaccgccaccgggataaacgccacccagtcgaacgagaaaccgtacttgaacggcaccggcacgctgatcagcggcacttcaggcagcgccgccatgtccacgcggcccagcagccaggccacgacgaagcccagggtcaggccgatcacgatcgagcccaggcgcaggaaggggttattgaagcggttgagtaccacgatggtcagcagcaccagcgccgccaggcccatgttgctcgcggcgccaaggtcgctggcgccaaacccgccggccatgtcggtgactgccaccttgatcagcgacaagcccatcagcgtgatgatggtgccggtgaccaccggggtgatcagtttgcgcagcttgccgatgaactggctcagcaccacctcgataaacgcggcgaaaaagcagataccaaagatcgtcgagaggatctcgtcagtgccgccaccccgggccttgaccatgaagcccgcgctgagaatcacgctgataaacgagaaactggtgccttgcaggcacagcagccccgagccgatcgggccgaaggtgcgcgcctgcacaaaggtgccgagccctgacacgaacagcgccatgctcaccaggtacggcacttcgctttccaggcccagcacgccgccgacgatcagcgtaggcgtgatgatcccgacgaaactcgccaacacatgctgcagtgcggcaaatatcgcggcggtgaagtgcgggcggtcttccagaccgtagatcaggtcggatttatagcgggggcgcggagcttgagcgtcagacaaaatgcgggctcgggtcagaaaatggaggcgcaggatgccagaaactgcctgtcgtcagaagtgtaaaaaaatatttataaagccccctgcgggaaaccacagcgccggccgatagcgtggtcaggcccacatactaatgacaacggtggtgaccaaggtctgggcagtgcgttgacgctgacagatcgtttcgcggcacggacgcgcgcagacactacttttgagagcacccccatgtccatccgtaatctgaatatcgctcctcgcgcttctctcggtttcgcgtttattgctgtgttagtggttgtattgggggtatttgcggtcaaccgtatgacgctgatccgccaggcctcggtggacatgagtaccaatcaactgccgagcgtgacttcactgtcggtgatcaccgaaaacgtgctgcgtatgcgcatcctttcgttccgcgtgctggtcaaccgtgagcctgccggccttcaggaagctgaagtgcgtatcggcgtgctggccgacaaggtgaagaccgcccaggccagttacgcagccttgcctgccgggcccgaggaggccgccctgtacaaggtattcacgaccaccctggacaactatctcaaggctcaggccgagatgctggcgctgtccaggcagaacaaggtcgatgagatgcgtgccctgatcaatacgcggatcaaggacggtaccgaccagatgggcgagcaactgaacaagctgatcgctatcaatgcagcggatgccaagcaagccaacgaggaagccgggcaaaattacagcagtgccatcactggcgctattgtcgtttcggttgccgctgcattgctcacggtattgctggcctggctgctgacccgcagcatcgtcgcccccttgcgcaaagccgtggaagtggccgaaaccatcgccggtggcaacctgaccaagaccattgaagacgacggcaaggatgaaccggcgcgcttgctgaatgcgttgtcgaccatgcaaggcaacctgcgccagaccatccagcacattgccggctcggccacccaactggcgtctgccgctgaggaactgagcgcggtcaccgaggaagcctccaagggccttcagcaacagaacaacgaaatcgaccaggccgccacggcggtcaacgagatgacggcggcggtggaagaagtggcgcgcaacgcggtgtccacctccgaggcgtcgacccagtccaaccaggcggcgcgggaagggcgcgaccgtgtggtggaaaccgtcggcgcgatccagaccatgacccaggacgtgcagaacactgccgcgatgatcgaaggcctggccacccaaggccgggacattggcaaggtgctggacgtgatccgcgcgattgccgaacagaccaacctgctggcgcttaacgccgccatcgaagcggcgcgtgccggtgaagcagggcgtggctttgcggtagtggccgacgaagtgcgggcattggcccaccgtacggcgcagtcgacccaggaaatcgagaaaatggtcgccggtatccagaacggcaccggtgaagccgtgcaatcgatgcaacagagcaaccagcgtacccaggacaccctggaaatggcccgcgccgccggtgtggccctggagcagatcacccagtccatcagcctgatcaacgagcgtaacctggtgatcgccagcgcttcggaagaacaggcccaggtgtcccgcgaagtggaccgcaacctggtcaatatccgcgacctggcgacccagtcggcggcgggtgccaaccagaccagcgcggccagccatgagctgtcgcggttggcggtggacctgaatgggatggtggcgcggttcgttatctgacctgaaatagggtcaaaaggtgggagggggcttgcccccgattgcaatgtgtcagctagacattggctgactgatacaccgccatcgggggcaagccccctcccacatttgccctgtgttgtgtcagcgctattgcttccaggcccctgggttcaccaggtttttcggtttttcacccgccagcgcctgcaacagattctccaccgcacacgtagccatggcttcccgcgtctcatgggtggccgagccgatatgcggcgtggccaccacattgttcaagcgcaacaacggcgagccatgatccagcggctcctgctcgaacacatccaaccccgccgcccgaatggtgcgctgttgcaacgcctgcaccagtgccgcctcatccaccaccttgccccgcgagatattgataaagatcgtctccgggcccatcagtgcgaattgttcggcgccaatcaacttctcggtttcagcagtgagtggcagcgtcaggcagacaaagtcggcctgttgcagcaagtcgttcaggctgcggtactgcgcgccaaagcgtttttccaccaaaggtttgggcgaatggctgtggtagatcaccggcatgccgaaaccgaaatgcccgcgctgggccagggcttcgccgatgcggcccatgccgatgatacccagggtcttgccgtgcacatcgctgccgaaatgcgccgggccgatattcttgctccactggccggcgcgcaccatgtcggccagctcgaccacacgccgggcggtggccaggatcagcgcgaagccggtgtcggcggtggtttcggtgagcacgtccggggtattgctgagcaggatgccgcgcccggtgaggtagtcgatatcgtagttgtcgacgcccaccgacacgctcgccaccgcttccagtcgtggcgccaggtccagcagcgtggcgtccaggcgcaggctggcacccaatagaccgtgagcggtcggcagggcatcgcgcagcttggccaggccggtctcgtccagcgcttcgatcagggtgacatcggcctgttcatgcaggcgggccatcaacggcgcggagagttttttgtacaacacgacagactttttcatgcggtctttaccttcaattccaggttgggcgccggtgtgcggtcactggcaccgggcttgagaaaaatcgtcaataccactgacagcagcaacgcgccgctcatcagcaggtacgaggcgccgggcgagccggtgctgctattgaggtagcccaccaggtacgaaccgccgaacgaaccgagggcgcccatgctgttgatcagcgccatggcgccgccggcgacgttggccgggaggatttccgggacaatcgcgaaaaacggcccgtagggcgcatacatgcacgcgccggcaatcaccagcagggtgtatgaccaccagaagtgttcggcgccgagcacataggacgcgtagaacgcgatggaggcgatcaacaacggcggccacacgaagcgcttacgtttttgcagcttgtccgagccccacgacaccaccagcatgccgatcaccgccgccaggtaaggcaacgccgacaaccagccggcctcgaccatgtccatctgcaagccttgcttgaggatcgacggcagccacaacacgaagccgtacacaccaatgctccagcagaaaaattgcagggccaggatgatcaccttgggcgagcggaatgcctcggcatagttcttcaccgccttgatgcccacctgttcagcggccagcgcgctttccaggtcttgtttctcggcgtcgctcagccatttggcctgggcgggcttttcatccgccagtttccaccagataaacgcccacaacaccgccggcaggccttcgatgataaacatccagcgccagctgaaatgctgcaccaggtagcccgacaccaccgacatccacagcatggtcaccgggttgccgaggatcaggaaggtattggcgcgcgagcgttcggcacgggtgaaccagtggcacaggtacaccagcatcgccggcatcaccgccgcttccaccacgccaagcatgaagcggatcacgatcagcatgtaggcgttggagaccacgccggtcagggtagcgaggccaccccacaggatcaggctgacgaagatcagcttcttgacgctacgcttttgcgcatagatcgcccccggtacctggaaaaaaaagtagccgaggaaaaacagcgcccccagcaacgacgacatgccgggggtgatcatcaggtcttcggccatcccggaggcggcggcgaagccatagttggcgcggtccaggtacgccaggctgtaggtgataaaaacgatgggcatgatgtaccaccaacggcgggtggcgagtttcacggtgtccatggggttgctcctgagcttgttgtagttgtggcaacagggaatgaatcaggcaacggatcgagcgggtaactctgaacgggtgggcaagccttccatatcgccacggctttgcacggcgcggctgccgatccagttgccgcgctgtaccgcttcgcggaagctgaggttttccagcagggcgctgatcatgcccacggcaaagccgtcgccggcgccgacggtatcgaccaccttgtccacgcgcacggcggcgacgaagccttggtccatttgcgtgcggtagtaggcgccgtccgggccgagcttgatcgccacggcttcggcgccctggtcgaggtagaacgcggcgatgtcggccgggtcatcgaagccggtcagcagtcgaccttcgcccaggcccggcagcacccaatcggccaggccggcaagggcgttgatttcgcggatcatcgtctgttcgctggcccacagcgacgggcgcaagttggggtcgaacgacacgctgcgcccggccttgcgcatctgcgtcatcagctcggtagacaactcgcgggtggcggcggacaacgctggcggaatgccggtggcatgcagatggcgggcttgcagcagggcagggctgatggccgcaacggacaaatggctggccgccgagcctttgcggaaatactcgacctgagggtcatcacccgtttcttcacgggacttgagctgaaaaccggtggggtgcaacgggtcgaccgccacatgccggcagtccaggccttctttgctcaaggtctccaccacaaagcgcccgagggaatcattgcctacccggctcagccaggccacgttgaatcccaggcgcgacaggccgatggcgacgttgctatcggccccggcaatgcgcttgtgaaactgcgccacttgcgccaggtcgccgctctgttcggcgacgaacatcgccatggtttccccaaacgacaggatatcgatctcagacatgggcattctccacgcgcggttggccaaggacggcgagggtggcaacgtgccgggcggtgacctcgaccaggtcatcgccttgcagcgggaattccaccgcccgggtaattccttgagtcatatgcttaagcagttgttcccacagatgcaggtcggtggcgcccggcggcacggcgaccagcttgccgtccgggcgacgggccacggccttgcaatgcaggtagtccacatgtcggcccagcaggcgtgcggcggtgagggcggattggtcctgccactgccagttgccgatatcgaaggtcatcttcaccggcagggccaggcgctccacttcgctgaagaagcgttgcatcggctcgatacgcccgccgtgcagggtctggtcgttttccaccagtaactgcacgggttggcggcggagcagggcgtgcaggctgtccaggtcgttggtgtcggtgaagtagccgagggatactttcaaccattgcgcgccgaaagcctgtgcgcggtccaaggtcgctgccagttcggcattcggttgggcgcggccggcgacccacagttccaggggcgatgagaacaccgattccaggttctgttgcgccgcggcctcggccagttccgtgggctgttcgtgggttaaaagctcttcgcgccattcgatgcgctgggcgccggcggcggcgagaacctcgacaaaactcaactggccttgttggcgtaccaagtctgcgccgtagctggaaaggctgatggagacggggtatttatgcattgttgtttacctctgaaaccggtttcatttttgttcaaaattttttagacgtgccgggtcgagccacgaaggatcaactcgggcaggaaatccagggtccgtgttggctcggtatcgccgcgcaagcgcttgagcaggcaattgaatgccgttgcaccgatggcttcggtcggctgggcgagggcggtgatgccagtgcctaccagcggataccagtccaggtcatccagggcgatcaggccgatgtcgtcgaacaagttgcaaccgaggttcttcagcacccgggtgcaggccagcgccgcgacgccgttggcacagaacagtgccttggggccaggtttggcaagaaaggtgtgcaggtgtttttgcagtgtttcatccaactccagcacagcgccggtcaatgccgggcggccggcgatttcagctttgaaactgtccaggcgctccaggcgcgagctggtgccatcggtggcttcacttaccatcagcacatcgcggtaaccctgtcgctccagatgttccacggccatgcgcactgccgccgggttgtccagccccaccagatcgctgtgcagcggctcgaccttgcggtccaccagcaccagcggcatttcccgttgcagttccagcagttggtcgaggtgatggccgagggtgttcacgatcagcccttcgatgttgtacgaacgcagcgccgccaggtgttggcgctcctgcgcgtcatcgcggtcggtgttgcacaccaccaggctgtagccatgctggcggcacgcagtttcgacgccgtgcatcacggcaatggaataggggttgcggatatcggccaccagcatgccgatcaggcgcgtgcggccgcgtttcaagccgcgagccatctggttggggcgatagccgagttcatcgatggcttgttcgatgcgcagggcgatggcatcggagagcagggcgcggtcgtcgccgataaagcgcgacacgctagccttggacacgccggcgcgctcggcgacgtcgagcatggtcacgcggctgcgctgggcggcggaaaatttgttcacggtcatcgaccttcttttcttattggaatgactgaaaccggtttcaggagagcactaaaccagtaaagtcgtcaagaagatgcagggcaaggccagatgaccggtacgctcagaccagcacacccaaccaggtcgcgcccaacagcagcagggccataccccgattgaaacgttgcatggccgtggccgaacgaaacacccgtgaagcgccggcccccagcagcgcccaagtgcccaggcaaggtatcgagatcaggaaaaacaccagggacaactgcaccacctggctttggcgctcggcaccctggccggcaaatacactcaccaccgcgagcgccatcatccaggttttcgggttgatcaattgcaggctggcggcgcctatcaggccaaggggtttttcgctggcggccacttcgacggcttgggcgggtgcactgaagatctgccaggccaggtagctcagccaggcgacgccggtccattgcatggccgtttgcactttgggcaaatgcaccagggactggcccacgccggtccccaccagcaacacaagaccggcagccccgacgcaggcgccgaggattatgggtaacgcggctctcaagccataccgcgcgctgttactcagcaccaggatattggtagggcctggcgtaatcgaggcgacaaaggcaaacaacatgaacggcaacatggcaggtgactccgacaaatccagtgatggcgtcgatcttcactggccggtatgtcatctgtctggaagatttgagcagcgcttgcggtacgcggcgggtgtcaagccgtaggcgcgcacgaaccagcggcccaagtggctctggtcggcaaaaccgagggccatcgcgacatcggcgggttgctcgcccttggccagcaagtggcgggcgcgggccaggcgcagttgcaccaggtaggcgtggggcggcaggccgaatgcgctcttgaacgcacgggtcaggcggaaacggtcgacgccgcaggccagggccaattcgtccatgcccacatcaacgtgcagatgggcgtgcaggtattcccgcgccttgtgcgcaaccagtggcaggcgcgggtcttcacggtagcgagtgcgccagtagagttggtcggtgaggcgctccaacagctggtccatggcgcgctggcgcacgatgcgcagttcgccgctgtgcagggtctggaaggcttggctggtcgccatggccaggcgcgggtcgcgggtcaaggtgctggcgaaagccagttggctattgagcggtgcttcttcaaacaccgcgctgacttcacgcgccaaccactgtgggtcgaggtagagcatgtggtaagtgaagccatctacagtgggcgcatcgccgtcatgcaattcgccgggctccaccaggaatacctggccgggcacgctgttatgtcgggtacggcggcagttgaattgctgcacgccttgctcggttacgccgatcaggtagctgtcgtgccaatgcgggtcgtacgcatgaccttcaaaatgcgcgcgcagggtctcgatgccggtgtcggcgtcctgggacaggtcgatccaattgtgcgcggccataaatcaccgaagcggaatacgtgaggctattagcgcccagcgtcgggtgggcgtctagaaggtttgtgcagcatcaaccgaacaacccggcggcgatattgatcgagaaccccaggatcgcggtgttgaacaaaaaaccgatcagcgattgccccagcactactttgcgcatcgcccgggtggcgacgcccacatcggaggtctgcaccgcgacgccgatggtgaacgagaaatacaggaagtcccaatagttgggcgtcagcagcccttcggcaaagcgcagcgccggctccttgccgtcccaggtgtaatacaggcgcgcgtaatgcacgctgaaaatcaccccgatcagcaaccatgaaccgatcactgtcagcccggtaaagccgtagtgcagcagacgttcagtggtggctaggtccttgctgccgaccagttcaaaggtgatggtcgccaggctggcgatggcggcgatgcacacggtgaacagcaccagcccggcgttttcatcttcgacctcggcgatgcgcttcacgtcctcggccttggcgcgacgggtgagccacagcatcagtaccaggtaggtccagaccccggcgttccagccaatcaggattttgctgaccagagtgtcagccggcgccaggatgcccacggcaaggccgagcacggcggcgacggagaggcgagggtgggtgcgggcgaggaagggcatggcggctcacagctgacagtgggtcaactgactgtacctcatcatgtgggagggggcttgctcccgatggcggtgtatcagtgaaaaatggttcagctgacataccgcatcgggggcaagccccctcccacagggtttaactcggtttaccggggagatttcttcactagcttcatgaccaccacaaagaacaccggcacaaacaccaccgccagcgttgcggtgatcatgccgccaatcacaccggtgccaatcgcctgctggctcgcggaactggcacccgtggcaattgccagcggcaccacgccgaggatgaacgccagcgaggtcatgatgatcggtcgcaagcgcaagcgcgcagccttcagggtggcgctcatcaggtcttcaccctggtcgtacaggtccttggcgaattcgatgatcaggatcgcgttcttcgccgacaggccgatgatggtgatcaggcccactttgaagaacacatcgttgggcatgccacgcaaggccacggccaataccgcgcccagcacacccagcggcaccaccagcagtaccgaggtcgggatcgaccagctttcatacaacgccgccaggcacaggaacacgatcagcagcgacaagcccagcagtatcggggcctgggagccggacaagcgctcctgcaacgacaagccggtccattcctggcccaggccggcgggcagttggctgaccaaccgctggatctcgtccatggcttcgccggtactgtgccccggagcggcttcgccggaaatcgcgatggccgggtagccgttgtaacgggtcaactgagccgggccctgggtccatttggcttcgacaaaggcggacagtggcaccatcttgccggcgttgttgcgcacgttgattttcatcaagtccgccacctggctgcgctggtcgccttcggcctgcaccaccacgcgctgcatgcggccctggttggggaagtcgttgatataggccgaaccgatggccgaggacagcacattgccgacatcggcaaacgacacgcccagcgcattggcctgcttgcggtccacttcaagctgcacttgcggtgcttcggccagcgcgctttcgcgcacgttggccaggatcgggcttttcgcggccgctgccagcaactcggtacgcgcggccatcaacgcggcatggcccacgccaccgcggtcctgcaggcggaactcgaagccgctggaggtacccagaccgtccacgggcggcggcaggatcgcgtaggccaccgcatctttcagctcgctgaaggccatgttggcgcggtcggcaatcgacgaagcggaatcgtcgctgccgcgctgcgaccaatccttgagcgtggtaaacgccagcgctgcgttctgcccggagccggagaagctgaagcccatgatcatggtggtatcacccaccccaggctcctcggcgttgtgcgcttcgatctgctcggccacctgcaccgtgcggttcttgctcgcaccgggtggcaactggatgtcggtgatggtgtagccctggtcttccactggcaggaacgaggagggcaggcggctgaacatccagcccaggcccaccagcaacaccaggtagatcagcaggtagcggccgctgcgcttgagggcataggccacccagccttcatagcggtcggtgaactgatcgaaacgccggttgaaccagccaaagaaaccgcccttggcatggtgctctccctgggggatcggcttgagcaaggtggcgcacagggccggggtcaaggtcagggcgaggaacgccgagaacaggatcgaggtggccatcgacagcgagaattgctggtagatcacccccaccgaaccggccatgaacgccatcggcagaaacaccgccaccagcaccagggtgatgccgatgatggcgccggtgatctggcccatggcctttttagtcgcctccttgggcgacaggccctcggtggccatgatccgctcgacgttctccaccaccacaatcgcgtcgtccaccaggataccgatggccagtaccatgccgaacatggtcagcacgttgatcgaaaagcccagcagcaacatggtggcgaaggtgcccatcagcgcaatcggcaccaccagcgtcgggatcaaggtgtagcgcacgttctgcaggaacaggaacatcaccgcgaacaccagcgccatggcttcaagcagggtgtagaccaccttggtgatcgaaaccttgacgaacggcgaggtgtcgtacggaatcttgtattccacattggccgggaaatagcgcgacagctcgtccatcttcgcccgcaccagcgtcgcggtgctcagcgcattggcgccgggcgacaactgcacgctgaccgcggtggagggcttgccgttcaggcgtgtggagaactggtattcctggctgccgacttccacccgtgccacatcgccgatgcgcacggtggagccgtccgggttggccttgagcacaatgtcggcgaattcagccggcgtcgacaactggcccttgaccaggatcgcggcggtgatttcctgggtattcgtgcccggcaggtcaccgatgctacccgccgagacctgggcgttctgcgcgctgatcgcggcgttgacgtcggctggcgtgaggttgaagccgatcagcttctgcgggtcgatccagatccgcatggcacgctcggcaccgtacagctgggccttgcccacgccatccaggcgcttgagctcgttcatcacgttgcgcgccaggtagtcgctgagcgccacgtcatcgagcttgccgtcgttggacgtaagggtcaccagcaacaggaagccggcggagaccttctccacctgcaagccttgctgggtcaccgcttgcggcaggcgcggctcgacagccttgaggcggttctgcacatccacctgggccatttccgggttggtgcccggttggaaggtggcggtgatggtggccgaacccaggctgctctgggattcgaaatacagcaggtgatcggcaccgttgagctcctgctcgatcaggctgaccacgctttggtccagggtctgggccgaagcgccagggtacaccgcgtagatttcgacttttggcggcgcaacgttggggtactgcgccaccggcaactgcgggatggccagcaagccggccagcaggataaacagggcgaccacccaggcgaagatcgggcggtcaataaagaactgcggcatggcgggttattcctttacgagcgggctgtcgtccacttcaactttttcaccggggcgcgcgtgttgcaggccttcgacgatgatgcggtcaccggccttgaggccgctgctgacgatccagcgatcgttgaccaccgcgcccaactccaccggctgctggctcacggtctgctcggcgtccagcagcaagaccatcgggataccggcgctgtcacgggtgatggcgcgttgcggcacgctgatgccttgcttgtcgacggcttgctccaggcgcacccgcacaaagctgccgggcagcaggtcgaggtccgggttggggaactcgctgcgcaggatgatctgcccggtgccggggtcgacgctgatctcggcgaacagcaacttgcctggcagtgggtacaggctgccgtcatcctcgatcagcgtggccttggcctggtcctggccaacctgcttaaggctgccagcgcggaaggcgcggcgcaggtcgttgagttcgcggttggactgggtcaggtcggcgtggatcgggtccagttgctggatgatcgccagcggcgtggcctcgttctggccgaccagcgcgccttccgttaccagcgcacgaccgatgcgcccggaaatcggcgcggtcacagtggcatagcccaggttcaagcgggcgcgctccacggcggccttgttggcggcgacttcggcgttggtctggcgcacggcggcgcgggcgttgtcgtagtcctggccgctgatggcgttgccttccaccaattggctgtagcgctgctcctgcaggcgcgccttgaaggcatccgcctcggccttgctcaggttggcctgggcgctgtcgaggtcggccttgaacggcgcggggtcgatgcgaaacagcacgtcgccctgtttcacgtcatggccttccttgaacacccgttgcatcaccacaccggcgacccgtgcgcgcacttcggcgatgcgcggcgcggcaatgcgcccgctcagttcgctgctgatcgacagcggcttggcttccagggtttcgatgcgcactttggccaggggcatttccggcgcttcggcggcagagtcaccacatgcgctaagggccagggtgagggccagcaggcaaaatggcgcaaacagattcttcgacatgctcttatcccaatattgactggcgcatcctaaggtcacctgcgccgtggtgctgtgaagctgtgtagctcgtgtgtgaagaaatgtaaggtgcggcgcgcggggcgccgggggcgtatatccttgcacaatcctgcaaacactggagatgccatgtgggagggggcttgcccccgatagcggtgnnnnnnnnnnnnnnnnnnnnnnnnnnncaccgctatcgggggcaagccccctcccacgtgggatttgtgtacgaccaacaactgtattttctggaaacacctttatgcccaacatcctcctggtggaagacgacgccgcactttccgagctgattgccagctacctggaacgcaatggctaccacgtcagcgtgctcagccgtggcgaccatgtccgtgaacgcgcacgcctgaacccaccggacctggtgatcctcgacctgatgctgcccggcctcgacggcctgcaggtgtgccgcctgctgcgtgccgactcggcgggcctgccgatcctgatgctcaccgcccgcgatgacagccacgaccaggtgctgggcctggaaatgggcgccgacgactacgtgaccaagccctgcgagccgcgtgtgctgctggcgcgggtgcgtacgttattgcgccgcagcagtctttccgagccccaggtggccaacgaccagatcatcatgggcaacctgtgcatcgacctgtccgagcgcaccgtgacctggcgcgaccaggcggtggagttgtccagcggcgaatataacctgctggtggtgctggcgcggcatgccggtgaagtgctcagccgcgaccagatcctgcaacgcctgcgcggcatcgagttcaacggcaccgaccggtcggtggatgtggccatctctaagctgcgccgcaagttcgacgacaacgccggcgaggcgcgcaagatcaagacggtgtggggcaagggctacctgttcagccgttccgagtgggaatgctgagccatgtttcgtgtattgctacgcctctacctgatcaccattgttacctacagcctggcgatctatctgatcccttcgttggtgatccagctgttcgaacaccgctacatgaactacaacatcgagcagacccgcggccagcaaaagctgatcgtcaagcaataccagcgggcaccggtggagcgttggtcacaggtgaccgagcaactgggccgcgattttgcgccgctgaaagtgcaattattgctgcgccaggacgccagctacaccccggcagaagaacagttgctggagcagggcaagtcggtggtgcgcctgggcgagtggggctggatggagcagatcagctcgccgatcaatgagcaattcgtggtcaagctgaccataccgcccgacccgatggacatgaacgtgctgtattgggcgatcaacgtgctgatcgtcgccgcgttactggcctgcctgctggtatggctgcgcccgcattggcgcgacctggaacgcctgaaaagcaccgccggacaactgggccggggcaacctggccgaacgcacacagctgccagccagctccagcatcggcagcctggcggcggtgttcgacaccatggccgacgacatcgagcacctgctcaaccagcagcgcgatttgctcaacgccgtttcccatgaactgcgcacgccgctcacgcgcctggatttcggcctggcgctggcgctgtccgaagatttgcccgaggccagtcgtgaacgcctgcatggcctggtggcgcatattcgcgagctggatgagctggtgctggagctactgtcctacagccgcctgcaaaacccggcgcaactgccggagcgggtcgaggtggtgcttgatgagtttatcgacagcgtactgggcagcgtcgacgacgaactggaaaaccccgagatcgtcatcgatgtcgcgctcgactgcgccgtggagcgcttcagcctcgacccgcgcctcaccgcccgcgccttgcagaacctgctgcgcaatgccacgcgttactgcgacaaacgcattcaggtcggcgtgaacgtctgcgccaagggctgtgaaatctgggtggacgatgacggcatcggcatcccgctcgaccagcgtgagcgcatcttcgagccgttctaccgcctggatcgcagccgtgatcgcgccactggcggtttcggcctcggcctggccatcagccggcgcgccctggaagcccagggcggcaccttgaccgcgctggcgtcaccgttgggcggtgcgcggttccgcgtgtggttgcccaacgtcgcttgatcaaagcaccttgacggcgcggccgatcgcctggattggtccggtgggcttgccggtcggcgagccccgtgggtcttccagggtcagctcgaacagctggttctgcgtcaacggtggcagcttgtccagcggcaccgacagtgtctggccgggcttgaccagccccaacgacaccggcccctgccacccatcgcccttggtccagaactgcaaggccttgtcggctggcacttccatcacgcccaaggggatcaactgaatctgctggtcattgctggcctgaatcacccagcccggtgcttggctttgcggcgcgaccagcaccaccacaaagcggggttccaggacgggcggacgcgtcagcaacagcgtggccagggccagcgtggtgaccagcccggcaccggccaggccgcgccatacggccagcaggttccaccagggggtgtgggcgctggcagtgtggcgctcgatgcgtcgccacaattcagcggagggcggcacgggctccgccaaggcggtcaacggcaacagacgctgctcccaggcgtcgactgcggcgcgcagctcggcgtcgtgcttgagtcgttgctccacttcggcgcgctgttcgccgggcagggtgcccagtacatattcgccggccagttcgtccagagggttgctcatgccatgcactcccgcagcgcggcgaggctacgtttgatccaggctttgacggtccccagcggggtgtccagtttccgggcgatttcgctgtgggaaaaaccgtcgacataggcatgcaggatgcacgtgcgacgggccgggtcgagctgctccaggcaggtgtggacttgcccggagcgtgcggtgaattcaaaggtgtcggtggctgcgacctgctcgtgttcatcgtccagcggcacttcgcggtagtgattgcgcaccacattgagcgccaagtgccgggtcacgctgaacacccagccacgggccgaaccgcggctggggtcgaaactgccggcgccacgccagatcttgatgaacgcgtcatgcacgatgtcttcggccagggccttgtcccggacgatgcgcagcgctacgccgagcaagcggctgctgtcctgctcatagagctggcgcaaggcacgctgatcaccacgcgcgcaggcctgcaggcaggcgtcgtaatcaaacacgtggtgctccccccaacgatcagtattgggggcagcgtagccgactttgctcagttggccgcccagaagatgtaatccgcctggtacttcaccacttcctgcttgcccttgttggccgcggtgcacgcgctgctcggcgccacgccacccttgagcgcgacgcgttggatgtaactcacgccgctcatcgcacccttgccttcggctgggttggccttgaccagttgatacggcaggttgcccgcgccggacggcgccacggccaattgggtgccggtgattttcgaaccgtccttggcctgccaggtggcgggcggaccgaagtaggtgccgacttgtttgccgctgcggtcattcaataccgccttgggcccgacaaacgtccactcggtctggccggcagcgttggctttgtcacggcactcgtaggtgatttcgccgacgccggtggtttccaacgccactttgtggccgtccggcaccttgatgctgtcgggcaagtcggcctgggttgcaaaggcggccggcgcggcggcgagcagggcggtgaggcagaacagtgctttagcgttcatgggtacttctccatttcagtaaaacagcggggtgactgaaaggactacccacggcgagcacgattggatgcagcgattagaaaataaacctcagagggcgcacactgtgtccccgttttacccgaggagagattggcaatgactggtgtgcacacgtctgctcaacaaggtttctctacccaggccgttacctacgcccaggggcggccggattatccacggcaactcaccggctggctggccgacacattgcgcatcagcgcgcagtccagcgtgattgacctgggcgccggcaccggcaagttcacccgtttgctcagcaccctggcaccgaccctgatcgcggtcgagccggtggcggcgatgggcgcgcagttgaccaaactgctgccggatgtgcgcctgctcaatggcaccgctgaatccatccccttgccagccgccagcgccgatgcagtggtgtgcgcccaggcgttccactggttttccaccgaggcggccctggcggaaatccatcgcgtgctcaagcctgacggccgccttggcctggtgtggaatgtgcgggatgaatcggtggattgggtcgccgcgatcaccgacatcattaccccgtacgagggtgatacgccgcgctttcataccggccgctggcgtgatgccttcagcggcaagtatttttcccaacccgaagtgacctgtttcccctacagccatgttggcagccctcaggaggtgatcatggatcgtttcctctccgtgagctttattgccgcgttggccgatgagcccaaggcccgcgtcaccgcgcaattgcaggcgctggtcgacacccatcctgcattgaaagggcgcgacaccgtggccttcccgtatcagacccaggcttacgtctgtcatcgactggtctaaaaggcataaagtcagatcatattggtataagtcgttataagaaaaatcgctatcctgcggccagaaatttataaggccgcaggtagctgtaatggatgtgggtaattttggtttcgtggttgccggcctgatcgttggttttatcgtgggcatgaccggtgtgggcggtggttcgttgatgacgccaatcctgttgtggttcggcatcaacccggccaccgcggtaggcactgacctgctgtacgccgccatcaccaagtcgggtggggtgctggtgcacggcaagaacaagaacatcgactggaccatcaccggctggctgacccttggcagcgtgcctgcggtgttgctgacgctgtggttcctggccagcctgcacaccgatcccagcgcgatgaatgcggtgatcaagcaggcgcttggtgtggtgttgctgctgaccgcgttggcgattctgttcaagaaccgcctgttggcgtttgcccagcggcatgcgggtgatagctatcacatgagcccgcgcaatctgaatgcgctgacggtggtgacgggggcgatcctcggtaccatggtggcgctgacgtccattggcgcgggagcgctggggacggtcgcgttgtttattctgtatccgttcctggctacgcggcggctggtggggactgagatcgcgcatgcggtgccgctgaccctggtggcggggttggggcatgccagcatggggaatatggattggcatctgctcgggtttttgttgatggggtcgttgccggggatctatgttggtagtcatatgacggggaagctgccggacggggtgttgcggccttgtttggcggttatgctcatggccattggttataaactggctttctgattgggggtatatccgttatttaggtaacggcggctattggttccgcccttacggcgggtcacttttggaagagcgagcgccaaaagtaaccaaaaacgcttcgccccaacactcggcaccgagcctgggcgaggtgccgagtgttggggcaagagcgttttgcttacttttgcgctctttcaaaagtgagccgctgtaagagcggaaccataagtagccgttacccaaataacggatatgccccctataaaaaacctcaacccacgacgccaggcccattcccaatctgccaaacaaacggcggctcagccccattgaccacccaatcccccacaatccgcgccttgtaaatcaccggattatgcgacgacaccgtccgcgcattccgccaatgccggtccagcgccttaccctggcgcacatccgaagcccccaacgcattgaacaactcactggtcgcccgctggatcaaccccgacaccaccacctgcgcggtagccgactcaatctcggccgccacgttcgcttcgcgctccaccgcctcatcccccccaaaccgcgccacatacgcccgttgcgccggcaacgtcgccttcagcgcactcgcctcggcggcatacaccagcgccgccacttcacccaccacctgttgaatctgcgcatcctggctgacatgcgccgcattgccatggctgtagatgcgcttgcggctgcgcacttggtgcgccacatcgcgcagtgccgcacggccgatacccgccaaggtggccagcagtaccaactggtagaacgcggtctggtatttgaagcgcgtggcaaagtcgatcacgttgtccgcctccaccaccgcatcgctaaagcgcgacgtgccgctgccggtggtgcgctggccaaagccatcccagtcgtcactgtgctccacgccaggctgacgggcgcgggttgcggcgatcacgtcgccaccggtgtcgctgcgttgggcgtacacgtcgatccagtcggcgaagatgctgccagtgctgtagaacttctctccgttgagcttccagtggtcgccgtcggggctgacctgggtgaccacgtcgccaatggccacgttgccgatttcggtccaggcacagccgacgatatcgccgtccacgaaacgcttgaaccacaggtcgcggccggcgccggacggtgcattcaggcggtcttcggcaaaggcgaagtgcccgcgcagggcctggggcacgttggagtcggcttcggccagttcgatcagcagttcgaacaactgcggcaatgaagcaccaccgccgccatattccaccggcacgcggacggcgccaaaccctgcctctttgagccactggatcggctcatggggcagggtgcgattgtgttcgcgcgctacggcaccttcggcgatgcgctggaagatcgggcggaaacgtgccgccagcgtggggtagtcgacgccgatggacagcgggttgatgacgtgatgttcggtcatggcgaggttcctgggcagtgatcgatgcagaggggattgcacagtccgtgccgggttccggggtgcgtatttacggggacaaacgtcgagttactgttgccctggcaacagcggatcgacaaaccgacgcaatccaacacactggcgatggtgccgggtatcaggcccaagccgcctggtctgggcgtttccccagcctggcacgcttgctgctcaagccctcgtacatcccttttgtacgaggtaccgtccgatgactcaacacgccgtgaaatttgcctactgggtgcccaacgtcagcggtgggctggtggtcagcaaaatcgaacaacgcacccactggggcatcgattacaaccgcaagctggcgcaactggccgaggctgcaggcttcgagtacggcctgacccagatccgtttcaccgccggctacggcgccgagaaccagcacgaatccgtggcgttcagccacgcgttgctggccgcgaccaccacgctcaaggtgatcgccgcgatcctgcccggcccgtggcaaccggcgctggcggccaagcaattggcgaccatcgaccagctcacccatggccgtatcgcggtgaatatcgtcagcggttggttcaagggcgagttccaggccattggcgaacactggctggagcacgatgagcgctatcgtcgttccgaagagttcatccgcgccctcaagggcatctggacccaggatgacttcaccttcaagggcgacttctaccggttcaacaattacaccctcaagcccaagccactgggccagccggaagtgttccagggcggcagctcgcgggcggcgcgggacatggccgcgcgagtgtcggattggtacttcaccaacggcaacaccccggaaggcatcaaggcccaggtcgatgacatccgcgccaaggcggcggccaataaccactcggtcaaagtcggcgtcaacgccttcgtgatcgcccgcgacaccgaggaagaagcccgcgccgtgctggccgagatcatcgacaaggccgacccggaagcggtgaatgccttcggtgatgcagcgaaacaggccggcaaggcgtcgccggagggcgagggcaactgggccaagtccagcttcgaggacctggtgcagtacaacgatggcttcaagaccaacctgatcggcacgccgcagcagattgccgagcgcatcgtcgcgctcaaggcagtgggggtggacctggtgctcgcgggcttcctgcacttccaggaagaagtcgaatacttcggcaagcgcgtgttgccgctggtgcgtgagctggaagccaaggcggcaatcaaacaggtggcttgatccgtgcaagcttgatccgtgcaagtagtgagcgggcttgctacaggtgtttttccaggcgaagggcgggagtgtggtcttcgtagtagtcgttgatcagggcaaagcgccgataaccgttgcgctcatagaggttgagggcgccggggttgtcggtgcgtacttccagacgtatgcaggtatagccctgtgccactgcgatagcttccacgtcgttcagcaactgcttgcccaagccaatgccgcgtgcatgctcggcaatggcaatcgaatacaggcgcgccgagcaggcgccccgacgaaataacaccagcgcatagccgagtaactgccggtcattttccgccaccagcaactggccgtgggcgcggctgaccatccactggaaactgcgcgatgacagccggtcgctgctgaaacagcgctgttccagtgccaccagttcagacacatcgttggaggttgcaacgcgaaagcaaagagccatatgaccgccgtaaaagttgtgtaacgaaacgggacttctctaaatgatcgtgcttaatagaaaaggtcgagttctctaaagcggatcaactattatgtcggcggtacaaggtcattggcgtgaagtatcggagcaaacagtcgcgacgacaataactgataaaggttatttttctgccgcactcaaaggaacccgtcaagtcgtgattattgtcgagcgcaaggaagattgggcctcctacttccccagcgaagacatcgtcaccgcccaggaatacctggaacagacccgggaaaccgagaccggcaagcgggtgcaggtgatcaacctgtgccgcagctacaagtacctggggcacggttactactgctcgctgctggccgaagcccgtgggcacaaggtgattccgtcggtgcgcaccatcagcgaactgaccaagaagtcgctgtacggcctggccctggatgacctggataaaaccctcgataaagccttgagtcatcatctttacagcaataccgaaggctttaccctgacactgtattttggccggaccaatatagagccgttgcaggacctggcccgtcagttatttgaagcgttcccgtgtcccatcctgttagttgatttcaaaaggagtaacggctggcatatcgaagggatcaagtccggtgtattgcacaagttgcgcgatgaccaggaagatcaattcgcccatgcgctggacaacttcagccgcaagatatggcgccagccgcgctcacgtcgcctggcccgttatgacctggccatcctgcacgatccccaggagcaattgccgccgtcgaatgccaaggcgttggacaatttcatccgcgtgggcaggggcctgggcatcgatgtggagttgatcgagcgcaaggactattcgcgcctggccgagtacgacgccttgctgatccgcgagaccaccagcgtcgacaaccacacctaccgcttcgccaagaaagccgaaagcgaaggcctggtggtgatggacgacccggcgtcgatcctgcgctgtaccaacaaggtctacctcaccgacttgctcaacagccaccaactgggcatgcccgccaccgaaattctgtacaaggagcgaccggaagacttcgagcgggtcggcgagcgcctgggcttcccgctggtgctgaagatccctgacggttgcttttcccgtggcgtgatcaaggttgaaagccaggaagccttgctcaaggccaccgccgagttgttcgagcattcagtgctgttgctggcccaggaattcttctacaccgaatacgactggcgcatcggcgtgctcaaccgcaagccgatcttcgcctgccagtacttcatgtccaagggccattggcagatctacaaccacaaggccatcggccaggccatcaacggcgaatgccgcaccctggcggtgcatgaagcgcccagggcggtggtcgagttggcagtgaagaccgccaacctgatcggcgatggcctctacggcgtcgacctcaagcagtccggtgacaaggtggtggtcatagaggtcaacgacaacccgaacctggatgcgggcatcgaggacgcctacttgcaggacgacctgtatggcctggtgctggaggagttcgtgcggcgcctggagttgaagcgtcagggccaggtctggtgacccggcgatgatccagcgtttcgagctgatcgatggcaagctgcagggcggggagagtgacgcagccccgatcatgctgttcaacaaccctgacctggccgaacgtgggtggctgcgcgaccatcacaaactggatgaacacgccctggcctcggccctggacccggatgaagtctcgcgtatcgagtttcaccccgacaatctgttcctgatctggaaacgccccgagaactactccggcggcggcaacctagtgttcgaagtgtcgtcctgcggcctgctgttttcccccagccgcctgctggtgatcgccaccgacgaaaccccgctgaccggcctgggcaagcgccgtccgctgcacacgccgctggatgtgctgctcgacctgctgctcaacaacatccaccattacctcggtcatctcaaggtgatcaagctggtcgcccgcgagctgcagcagcagttcaatgcgtccatgagcaaccaccacctgatgcagatgttcagcctcagcgaaagcctgatctattacatcaacgcgctgcacagcaacggcgcggtgttgtcgcggctgcgcaaccacgcagagaaggagcatttcagcgctgagatcattggcttgatcgatgacctggtcatcgagaaccaccagtgctacaaacaggcggagatctattccaatgtgttttccgggctgatcgacgcgcgcggcaacctgatgaacaacagcatgaacaacctgttgcgcaagctcacgctgatcaacgtggtattcctgccgctcaacctgattgcgagtatcggcggcatgtcggagttcagcatgatgacggcggggacgccgtggtgggtgtcgtatccactgttcttggcggcaatgggagtgggcggtgggttgatggtcctgggcctcacgcgcatcaaattgtaggcgctggcgtcagggggagggttgcaacgtcaggacctcaaagccgtccgccgtcaccgccaccgtatgctcccactgcgcggacaggctgttgtccttggtcaccaccgtccacccatccttcaagctgcgcactttcgagctgccctggttgagcatcggctcgacggtgaacaccatgccttcgcgcaataccagcccggtaccggggcggccgaagtgcaggacctgcggttcttcgtgcatctcgcgcccaatcccgtggccgcaatactcacgcaccacgctatagccgttggcctgcgcatggctctggatcgcatggccgatatcccccaggcgcgcgccgggcttgacctggcggataccggcccacatggcttcaaaggtctgctccaccaggcgccgggccttgggcgcgacgctgccgatcatgtacatcttgctggagtcggcgataaatccgcctttttccagggtgatgtcgatgttgatgatgtcgccgtccttgaggatctccttggcgctgggcatgccatggcacaccacctcattgatcgaggtgttgatgcagaaggggtagtcgtactggcccaggctcgccgggcgggccttgaggtcattgcggatgaaggcttcgacggcggcgtccagctccagggtggagcggccggcggcgacgaacgcatcgagcatgctgaagacctgggccagcaggcgcccggactcacgcatcacggccagttgtgcggcagtcttgatcatcaactgcgcccccggatcaggtcaggtttgtccagcaacagtttgttgatcaactcgttgtagggcagctgggggttgagctcggcgagcaggccgatcttgatccagaattcggcctgggcgttgatggagcggtccatcgcggcgctggccaggcgcagttgttcgtgcagttggtcggtgatcttgacgatgcccatggtgttcactgtgctgggttgatatacaaagcgtatatgtttcgtatatagggcgtaaacccccggccgctaaatggcgtaaggccattgacttgggcgcgggccgccggttagtttcgtgacatgacctttcaaacctttcgcagccagccaagcattattaccgccattcctcatttggcgggatagcgcacggctctacccaaacccgcccttgaggcgggttttgtttttccgtctcccgggccctttacaaaaagccaggagacagccatgagtacccgccccgagaccgccgacacgggcttgcttgaacagtatgtgaagaagatcctcgccgccccggtctacgacctggcggtgcgcacgccgttgcaggtcgcgcccgcgctatcggccttgctgggcaaccaggtgctgctcaagcgtgaagacctgcaaccgaccttttctttcaagatccgcggcgcctacaacaagctgatgcagttgagcgacgcgcaaaaggcccggggcgtggtcacggcctcggcgggcaaccacgcacaaggcgtggcgctggcggcgcgggagctggggatcaaggcgcgcatcgtgatgcccgccagcaccccggaactcaaggtactcggcgtgcgctctcgcggtgctgaagcggtgttgcatgggcagagtttcccctttgccctggcccatgcgttgcaactggccgagtcatcccgcgccaccttcgtgtcgcccttcgatgacccggatgtaattgccggccagggcaccgtggccatggagatcctgcgtcaacaacagggcgcgttggacgcgatcttcgtgcccgtgggcggtggtggcctgatcgccgggatcgccgcctatgtcaaatacctgcgtcccgaggtgcgcatcatcggcgtcgaacccgaaggctccagctgcctgttggcggcgctgcaagcgggggagcgggtggtgctgcccagtgtcgacgggtttgccgacggtacggcggtggcgcagatcggcgcctacgggtttgaaatctgccgccattgggtggatgaagtcatcaccgtcagcaacgacgaattgtgcagcgccatcaagttgatctatgacgatacccgttctatcaccgagccttctggcgcattggcggtggcgggtgtgcgcaagtacgtggcaactagaggcgtacaggggcagaccctggtcgcggtcaattcgggggcgaatatcaacttcgatagtttgcgacatgttgctgaaagagttgcggcgcaaagcgcaagttcagggttaaacgtttaatcgcagccaatcgacgacgatttaaacaacgctgctttacttatataacccggcccatcgcttatgaggaaaggttacaacgatggccgattttgccgagtaggcttgggtgttacaagcgtcttccagggtcggcaagacgcagcgggcgagcgcccgtgggtttaataacaatctgttggcagtctcagaaaaggagaggttgaccatgctttcggaattagaacttcgcagcattattgaaggaagtttcctgcccaaacggtgcgaatgcaccaaagccgaagatgcttcgctgacgatcaaggtctacgacgaccatgaccgtgaccgggtggatttggaagtcaaaggcatcaacgccgataaactcgacagcagtcgggccatttgcaacttgatcaccgggttacgtgaagatctcaagcacgcccatacccctatcctgcaacgtgcaggaggacgggcttactgaatacttgaatgttgaaccgtgggcctggtgattgccaggcccagtgctgtccagtcagttctggaagtcgcaggcgtcggacatcttccgatagctcacgtcttcgactttgccggccttgtccaaaaacttgatatccgccttgatgactttgcattcatcggtcggggtttcgttcatggccaggaccttgtcaatgttcatcggcaggccgtagtggtagggcacgggtttgacagtggcgacttgatcgtcggcctgggccaggcctgacacggctgccagcgccaggctggcgccgagcattaaggtgcgcagtttcatggtgttgctccgcaagtgggtaccacttcactgtcgacttgcgggattaaccatcgattaatgtttagttggctgacaaaatcttcatccaagctgctggcggtagggcaggtccgggccggtcttggtgcaggtcagcgccgcggcgcggatcgcaaagccgagcatggcgtcgatctgtgcaagggtcagccgttgcaggccgtccaccgaatccagctgctgctcggtcagccaggcgatcagcgcggcctggaaggtatcgccggcacccaccgtatcggccatcaccaccttgaccgccggcgcagaccaattgccgtgctggcggctgaacacgctggcgccgtcaccgccacgggtgaggaacaccaattggcaacggtgttgcagccagccctgcagcacgctttccggcgattggtccgggtagagcaaatgcaggtcttcgtcgctgaccttgatcaggtcggcatgcttgaccagttcggccacgcggtcgcgccacagttggatatccggctgcgggttgagacgcacgttggggtcgaggctgatcaggcgcttgccgctttcgcgcttgaccaggttcagcagcgtgtcgccgatcggttgcactaccagcgagaacgaaccgatgtgcaggccgcgaatatcatcgcccagggcaggtagatgggcgatttccagcagccggtcggcgcagccttcgccacggaagttgtactgcggtgaaccatcggcgcccacggcgaccatcgacagggtggtcggtgcggcgaactccaccaggaactgctcgctcacgccttcatccttgagcacctgcaataagcggcggccaaggaagtcggtggacaagccgccgaacaacccggcctcgatacccaggcggcgcaggcctaccgccacgttgaacggcgaaccgccggcaatcgccttgtagttgaccttggaggcctgcccgctggcatcttcctcgctgaagaaatcaaacagcgcttcaccacacaccagatacatagtcgttcgctcttaaagggttgccacgagttgttgatagcgctcgtaagcctgctggtaggcgcccacgctggccgccaccggcagggtccggctggcggggtcgacgcttacgcatttgtcgcaaaggctggccagcgcttcgccggactggcaccacgccgcctggatcgccgcgcccagggcggcggcttcgctttgttcggtgcagatcacttcggtgttcatgatgtcggcgaccatctggcgccataccgggcttttcgaaccgccgccgatcaagcggatgctctggctttgcaggccggtctcgcgcagcaggtcgaggccgtagcgcaggccgaaggtggtgccctcgaccacggcgcggcacaggttggcgcgggtcaggttggtcatggtcaggccgtgcaggctgccggtggcgtggggcagggcgggtacgcgttcaccgttgaggaacggcagcatgcttacaccgtcggcgccaattggagattgctcgaccagggcgttgaacgcggccaggtcgaggtcgaacagctcgcggaccaccccggtggcattggtcaggttcatggtgcagatcaatggcaaccagccgccgctggatgagcagaaggtagcgaccgaagcctgcgggctgacgttgggttggtcggcaaacgcatacaccgtgcccgaggaccccaggctcatggtgatcacgccaggcgcgatattaccggtgccgatggcgcccatcatattgtcgccgccgccgctggaaacgatggcattggggttgatgcccaagcgttcggcgatggccggcaggatcgtgccgacgctttgattcgcctcgatcaacgctggcagcgccgcttcaaggcggccgctggggtcgatgtgcttgagcaggtccacatcccattcacggctgcgcacattgaagtagccggtgcccgacgcatcgccatactcggcgacggcacggccggtgagccagtagttgaggtagtcgtggggcaacaggatatgcgcaatgcgcgcaaacaggtccgggtgctgttcgcgggtccacagcagtttcgacacggtgtagcccggtgcaatcgccacgccgaggcgttccagcgagacgttctcaccgcctagatcggccagcaggcgctcgttttcaggcgtggtttcggtgtcgcaccacaacttggccgggcgcaacacctcaccgtgttcatccagcagcaccaagccatgttgctgcccggacacgccgataccgaggatgtcctggccgtccacaccggcctgttgcagggcgcggtgggtggcttcggtgaaagcgtccagccattcctgggtgtgctgttcgcggcggccgttggcgccgctgatcagggtgtgcgccgcagcgccgaggccgagtaccttgccgctggaggcgtcgaggacgatggccttggtgccttgggtgccgcagtcgatgccgagaaacaggttttgctgggtcatgagggtgtgctcagcagtttattgttcgagttggccatgcattccaatgtgggagggggcttgcccccgatagcgctgggtcagctaaagatgcatcaactgacactccctcatcgggggcaagccccctcccacatgtttaggtcggtttcttcaggagttgctgcagtgttttggtcacgccgttatcgcgcaagctcacataacaccgctcgaacgctgccacaaactcagccgacttgggaatagccgtgccaaaaatctcctccacccccagcaggcgtttgctgatcaatgcatcctcactcaccagcccctggcagaactcggcgcgcggatccgggatcttgtagctcacgccattctcatccacgcccttgaggtaaagcgcccaagcggccaccaccagcgccgcacgctcggtctcgcgcccatcggcaatcaagcgattgatggtcggtacggtgaacttgggaaacttcgacgagccatcggaacacacgcgttccaattgatcggcaatcgcctggttggagaagcggtcgaccaatgtctgcttgtattgcgtcaggtcgatgcccggcaccggcgccaggttcggcgtgacgtccaggtccatgtaggcgcgcatgtaggccacgaacagcgggtcattcatggtctcgtgcacaaaccgataacccttgagaaaccccaggtaggtcaacgccaggtggctgccgttgagcaggccgatcttcatctcttcatagggcgtaacgtcatcggtgaactgcacgccgaccttttcccaggccgggcgaccgttgacgaatttgtcttccagcacccactgcacaaagggttcgcacaccaccggccaggcatcgtcgatgccgtgctcgtcgtgcaattgcaggcggtgggcggtgctggtcatcggcgtgatgcggtcgaccatggcgttgggaaagctcacattggccttgatccagtcgtgcaactcggcgttgtgcagggcggcgaaggccagcagcgccttgcgcgtcacggcgccgttgtgcggcaggttatcgcaggacatcacggtaaacgccggggtgccggcggcgcggcgctgggtcaacgcggcgcagataaagccgaacacggttttcggtgcgctcggctgcgccaggtcgtgctggatctgcggcaagtgggccatgaactcgccgttgctgtcgtcgatgcagtagccgccctcagtgatggtcagcgacacgatgcggatggccgggtcggccagtttgtcgatcagcgcctgggcgccgtcttcggccagcagcatggcgctgatcgagccgatcacccgcacttcggtgtcgtcggtatcgcccagttcgtacagggtgaacaggtagtcctggccagccaggtcgtcgcgggccttgcggtcctcggcgcgtaggccgacgccgcagatgctccagtccaacccttcgccggtgttcatcagcgcatcggtgtaatacgcctggtgcgcacggtggaaaccgccgacgccgatatgggcgatgccctgggtggtgctggcaatcgcatagctgggcagcttcacttgcgatgccagctgggtgaggttgtgtttattcagtttcatcagctcaatctcgcgaaatcaggcggcagcgcgcagtgggcgggccacggccacgccatcggtgtcgaacagatggcagtgcgccgggtccaggtacaggtgcagcgtctcgccgtactggctggccatgtcgccacggatccgcatggtcagcggctcgccattggcggtgatgacgtggcagaaggtgtcgctgcccaggcgctcgccgacgtcggcggtgacggtcagggtggtttggccgggcgtggcgatttccaggtgctccgggcgaatgcccagggtcaccgcgctgccgacgcgcaggctggcgctgctcaacggcaggctgatgctggtgccggcgtccagttgcacttcgcagccctggccttcgacacgggtgaccgtgcccttgaggaagcccatcttcggcgtaccgagaaagcccgccacgaacaggttggccggctggtggtatagctccagcggcgagccgacctgctcgatacggccactgttcagcaccaccactttgtcggccagggtcatggcttcgacctggtcatgggtcacgtagatcatggtcgcctgcagctctttatgcaggcgcgccagctccaggcgcatctgcacgcgcagcgcggcgtcgaggttggacagcggttcgtcgaacaggaagatcttcgggttacgcacaatcgcccggccaatggccacacgctggcgttggccgccggacagttgcttgggcttgcgctccagcagcgggcccagttccaggatgcgtgccgcttcgctgactttgctttccaccagcttcttgtcgaccccggccaggtccagggcaaacgacatgttcttgcgcacgctcatgtgtgggtacagcgcataggtctggaacaccatcgccaggtcgcgcttggccggggtcacttcggtgatgtcgcgcccgtccagttcgatggtgccttcgctgacttcttcgaggccggcgatcaggcgcagcagggtggatttaccacagcccgacgggccgacgaacaccacgaattctttgtcgttcacttccaggtcgatgcccttgatgatggaaaagccttcgaagcctttttgcagattcttgattttcaggttggccatgatgggcctccgctaggaattattatttaacggcgccgaaggacaggccgcgcaccagctgtttctggctgatccagccaaagatcagtatcggcgcgcaggccagggtcgacacggcggacaatttggcccagaacagcccttcggggctggagtacgaagcgatcagcgcggtcaacggcgcagcggcggacgaggtcaggttcagcgaccagaacgcttcgttccagcacaggatcagcgacagcaacacggtggaggccaggccccccttggcaatcggcaacagtacgcggaccatttcctgccacagggtcgcgccatccaggcgcgcggcttcgaggatgtccttggggatgtccttgaagtaggtgtaaaccatccagaccacgatcggcaggttgatcagggtgtagatgatgatcagcgcgatgcgtgtatccagcaggccaaaactcttggccagcaggtagatcggcatcagcacgcccactggcggcagcatcttggtcgacagcatccacagcagcgtgcccttggtgcgctgggtttcgtagaacgccatggagtaggcggccggtaccgagatcagcaggcacaaggcggtggcgctgaaggaaatcagcaccgagttccacgcataactgaagtagttgctgcgctcgttgatgtgcaggtagttctccagcgtcggcgtgaagatgaactgcggcggcgtggcgaacgcgtcgatttcggtcttgaagctggtcagcaccatccagaagatcgggaagaagatcaggatcgcgatggcccaggccagggtgccgagcaacaggctttgcaggcggcgggattgttgaagcgtcatggcgcggccctcaaggcttgtcagtcaggtttttgccgatcatccgcaccaggatgatcgccgcgatattggcgatgaccacggcaatcaagccgccagccgaggccatgcccacgtcgaactgcaccagcgcctggttgtagatcaggtaggcgaggttggtcgaggcgtagccggggccgccgttggtggtggtgaagatttcggcgaacaccgagagcaggaagatcgtctcgatcatcaccaccacggcaatcggccgggccaggtgaggcagggtcaggtgccagaagatcgcgatggcgccggcaccgtccaggcgtgcggcttccttttgttcctggtcgagggactgcatggcggtcatcagcaacaggattgcaaagggcagccattgccacgacacgatgatgatgatcgacagcaacgggtagtgcgccagccagtccaccggctcggcaccgaacagcttccacacggcggcaagaatccccgacaccgggtggaaaatcaggtttttccagatcagcgcaccgacggtgggcatgatgaagaacggcgagatcaacaacacccgcaccaggccacggccgaagaactcactggcctccagcagggcactgatcaacacaccgaacaccacgctgatcagcagcacgctgcccaccagcaacagggtattggtagcaccgggcaggaagcccgagtcggtcacgaaatacgtgaagttctccagcccgacaaactggttttcaccggggtagagcaggttgtagcggatcagcgaaaagtacagggtcatgcccagcggcacgatcatccacagcagcagcaaggccaccgaggggctgacgaggaaccagccggggttggccaggcggtttttggcgggtgtattcatggtattcacgaccggtacagagcaagaatcggagtgcgatcagtgtgggaggggcggtgcgacgattcgacttgcccccgatagcggtgtgtcagtcacacattcatcaactgttagattgctatcgggggcaagccccctcccacatttgactgtgggtagggctggattacttggggtagcccgcccgcttcatttcacgctcggtggtggtctgcgcggcggtcaaggcttgatccaccgtctgctgaccggtcagcgcgcctgagaaaaacttgccgacctgggtcccaatcgcctggaattcaggaatggtcaccaattggataccgatatacggcaccggcttgagcgtcggcttggtcgggtcggcgactttcagcgattccagcgtcaccttggcaaacggtgcggctttcatgtactcgtcgctgtaggtcgacttgcgcgtgcctggtggtacgttggcaacgccatcggtcttggcaaccaaagcgccatattccttggaggtggcccagctggtgaacaccttggcggcgtccttggccttggaactggttggaatggccaggctccaggagtacaaccacgacgtacctttgtcggtcttctcatgaggggcaaaggtgaagccgacatggtcagccactttgctctgggtcttgtcggtgacgaacgagccggccacgctggcatccacccagatcgcgcacttgccgctgttgaacagcgccaggttttcattgaaaccgttgctggaagcgcccggcgggccggatttcttcatgttgtcgacgtagaagttcagcgcatccttccattcagggccgttgaactccggttgccatttctcatcgaaccaccgcgcgccgtagccgttggccagggtggtgatcagcgccatgttttcaccccaaccggctttgccgcgcaggcacaggccgtattgctctttggtcttgtcggtgagtttgctggcgaattcgccgatctgggtccaggtcgggtgctcgggcatggtcagcccggcgtccttgaacaggtcggtgcggtaataggtgatcgagctttcggcgtagaacggcagggcatacagcgagcctttcacggacaaaccgtcacgcactgaagggaatacatcgtcgaggtcgtaggacgccggcagatccttcatcggctccagccaacccttggcgccccacagtgcagcttcgtacatgccgatggtcaatacatcgaactgcccaccctgggtggcgatgtcggtggtcaggcgttgacgcagtacgttctcttcgagcaccacccagttcagcttgatctccggatgctcggcctcgaaggttttcgagagcttttgcatacggatcatgtcgctgttgttgacggtggcaatggtcagggtctgcgcgccaaggctgacggcgctgatagtcaagcaggtagaggcaagcagaacttttgctgtgaatttcatcgcgcactccgtttccgcgcccagggggctacagaaggacagttattgttgttgtgtcttcccacgagctgtcaggaagagtgtgcgttgattacagccttgaaatggggttgtgacaaatccttgggcgcactggcactgatacttttttgcactcgggctcaagccggctgaaactattaagccaggttctgttcggtgagccgctgcaccgccaggcgccggtagtgggaaggggtcatgcctttaagctgctggaagcgtcggttgaagttggaaatattgttgaagcccgactcgaaacacacatccgtcacggctttatccccatcggccaacaactcgcaggatttgctgatacgcaaacgattgacgaattcgatgaacgtacgcccggtagcctgtttgaacacgcgtgagaagtaagtcggcttcatccccaggtattccgccacttcctcaagcggcaactcgcgcgcgtagtgcgcaaaaatgtaatccactgcacggttggtgcggtcgatgctgtgttcatcggccagttgcggcgtggtcacaccggacagcagttggtagtcctcgcaggcgctcaatacttccagcaggataaagaagtgccccaggcgcgccatgccctgggcgtcctcgatgcgttgcatcagggtcatggcctgggcgatggtctttttgcagcgaaactcgatgccgtactgcgcgcgttccagcagtggtgccaggcttttgagttcggcgaagatgtggctgccgtgctcgaacagttcatcggtgaaattcaccagcatgtcgcgcttgggcaccacctcgtcttcgtccacctggctgatccagttgtggggcaggttggggccggtgagaaacaggctttccgggtagaagttgccgatatagtcgccgataaacaccttgccggagctggcgacgatcaggtgcagctcgtattccttgtggaagtgccagcgcaccagcgggcaagggaaaccgtgttggcgatagatgatggacaggccgttgtggtcgtccatcagttcgtaggaagggtcggtgatgcgcgctgctcgggtcatgctgccgccgctttattgtggttgctgcgtaggataatgcccccttgcgcacgacctcgccagcgtcgatgtttatacgttgcggttttttgcctcgatccactgcgacatgtactgggtacttttatgggcgtggtggcgcagcatgctgccagtgaagttatcgcgtcgatgggccgcgaggtgttgacggcactgctccaggcaggccaccagcgccgggccgtggatgtcctggtcataccgccgggccagcagttggcgaccgtcttcctgggcctgggtccagcgttcacggtcttgatacaacgccaccgccgccgccgcgagggcaggtgcgctctgttctactgcgccaggccatggctgttcatcccccatggcctcggcgccgattggggtggtgacgtttggcgtgccgcagagcattgcatctgccagcttgcccttgatcccggcgccgaaccgcaacggtgccaggcagatgcgcgccgccgtcatcacttgcaaggcgtcttcggcccagttcatcacatgaaacccttgtgccgggttatgcaaggccgtggctttgggcggggtgtaggcgccataaatgtgcagttgcgctcccgggagttgctggcggatcagcggccacaggctgtttttcatccagagcaccgcatcccagttgggggcgtggcggaagttgccgatgctgaggaaatgggcgcggtcttcaaatggcgcgaagggctcggtcggccgctccagcatcagcgggcaccagtggagcagggcgggcggcaccttgaagtgctcggtcagcaggcggatttccacgtcggagatcatcaggctgatgtcgcagcggtaaatcgccgcgatttcccgtttggccaggtcggtctcggccattagtcggaactcttccggaagtgccgggcagaacaacgcgctgaagtcctcggtgtcgggatgcgccttcaggtgatccttgacgcgttggtgacgggcatcgcgcaagctttgcaggtcggaggtttccaggacacgcagggcgcctgggcagcatttttcgacgcgccagccgaactgctcctccatcatgaaacggtcgaacagcacgatatccggggccaactcgcgaataaaatcatcgaaactgcggttattgagttcgatggcgcattcggcgatgcccagcgcaggcaaatcggccttgtgctcgccgacggtcgcggggctgctgaaggttatgtcccaaccttgtgtaagaaagctctgaagaatctgcatcatgtgcccgcctgcggccgaggaacacggctccggccagacataaccaatgaccaggactttggtggcaggctgattcatcaacaacaggttccttgaagggcagggcgatcggcgcgcaattaaaccataaccggcggcatgacaatttatgtctggcggtaggtagccatcgcactttgtggttaacttccgcctctcgaattcgtttcatcaaacccagcataaggattctgttcatggctcaagtcacccttcgtggtaatcctgtccaggttgaaggcgaactgccgaaaaccggctccaccgctcccgagttcagcctggttgctaccgacctgtcgcaagcgaccctggaaaccttcgccggcaagcgcaaggtgctgaacatcttcccaagcgttgacaccccgacctgcgcgacctcggtacgcaagttcaacgcccaggccaacgacctgagcaacacggtcgtgctgtgcatttcctctgacctgccgtttgcccagaagcgtttctgcggcaccgaaggcctggacaatgtgctgagcctgtcggacttccgcaacgccgacttcgctgtcgactacggcgtttccctcgccgacggcccactgcagggcctgactgcccgcgccgtggtggtactggacgagaacaacaacgtgctgcacagcgaactggttgcggaaatcggccaggagccgaactacgaagcagccctggctgttttgaagtaactgtttcggtacgttactgtcgttttgcagtaacacgcttgatgcatgattgcggcctggcctagtccaggccgtttttatttgtgcctcaactgcttagcgaaatagcgggcagactaagatcagcagttaaaagttgtaagcccaaggtaaatagccggtaaaggcgcttttctaaatgcgccccagtgcttatctttcagcctcccaaagaagaagctctcgcgcccaatggttgatcactccatgcaatcctccccccgtaaatcccgccgctggctgttcggcctgctcgtgctgctggttatcgccggcctgtgctggaaattctggcccggcagccataaggatggcgccgaaaagcctgcgggccatgccggcaagacggggatgatgcgcccggggttcggcggctcggccggcccggtgccggtgcgcgtggccccggccgtgctgggagaattcccggtgtactacaaggcactgggcacggtgaccgcgctcaataccatcaatgtgcgtagccgggtgggcggcgagctggtgaagatcgcctttgaagaaggccagatggtcaaggccggcgacctgctcgccgagatcgacccgcgcagctaccagaacgccttgctccaggcccagggcacgctgatgcagaaccaggcccagctgaaaaacgcccaggtcgatgtgcagcgttaccgcgacctgtacgcccaggacagcatcgccaaacagaccctggacaccgccgaagcgttggtcctgcaataccagggcacggtcaagaccaaccagggcgcggtggatgacgccaagctcaacctcgaattcaccaagatccgtgcgccgatcagcggccgcgttggcctgcgccaggtcgacgtgggcaacctggtggcggccaacgacaccaccttcctcgcggtcatcacccagacgcaaccgatcagcgtggccttcaccctgccggaaaacaccctggaaaccgtgctcacccgctaccacgccggcaacaaactgccagtagaggcctgggaccgtggcgacgtgaagaaacaggccactggcgtgctgcagagcctggacaaccagatcgacgtcaccaccggcaccctgaaattcaaggcgcgtttcgataacaaggaccaggcgctgttccccaaccagttcgtcaatgtgcacctgctggccgacaccctgcataacgtggtgctggcgccgtcggcggcgatccagtttggcaacagcggcacctttgtctacgtgctggacggtgacaagaaggtcaagatgcagcccctggtggtcggcgataccgatggcgacaacaccgtgatcaaagagggcctcaaggcgggcgaccgcgtggtgctggaaggcaccgaccgtctcaaggatggcagcgagatcgaagtggtcaacgacagcagcgaagtgccgaccaccccgaccgaacacctgcaaggcaagcctgcggccaaaggggagaccggcgccaccgccggcaaggcgcaaaaggtcggttcatgaacctgtcgcggctgtttattcttcgcccggtagctaccacgctgagcatgctggccattgtcctggccggcatcatcgcgtaccgcttgttgccggtgtcggccttgccccaggtggattacccgacgatccgggtgatgaccctgtaccccggcgccagcccggacgtgatgaccagcgcggtcaccgcgccattggagcgccagttcgggcagatgcccggcctgacgcagatggcctccaccagttccggtggcgcgtcggtgctgaccctgcgtttcaacctcgacatcaacatggacgtcgccgagcaacaggtgcaggccgcgatcaacgccgccaccaacctgttgcccaaggacctgccggcgccgccggtgtacaacaaggtcaacccggcggataccccggtgctgaccctggcgatcacctccaagaccatgctgctgcccaagctcaatgacttggtcgatacgcgcatggcgcagaaaatcgcgcagatcagcggcgtcggcatggtcagcatcgccggcggccagcgccaggcggtgcgcatcaaggtcaacccggaggccctggcggccaacggcttgaacctgtccgatgtgcgcacgctgatcgctgcatccaacgtcaaccagcccaagggcaatttcgacgggccgacccgtgtgtcgatgctcgatgccaacgatcagctagtctcgcccgcgcaatacgccgaactgatcctggcctacaacaacggcgcgccactgcgcctcaaggacgtggcgcagatcgtcgacggcgccgaaaacgaacgcctcgccgcctgggccaacgaaaaccaggccgtgctgctgaatatccagcgccaaccgggcgccaacgtgatcgaggtggtggaccgcatcaaggcgttgctgccgagcatcaccgacaacctgccggccggcctcgacgtgacggtgctcaccgaccgcacccagaccatccgcgcctcggtcaaggatgtgcaacacgaattgctcatcgccatcgccctggtagtgatggtgacgttcctgttcctgcgccgggtcagtgccacgatcatcccgtccatcgccgtgccgctgtccctggtgggcacctttggcgtgatgtacttggccggattctccatcaacaacctgacgctgatggcgctgaccatcgccaccggctttgtggtggacgatgccatcgtgatgctggagaacatttcgcgctatatcgaggaaggcgaaacgccgctggccgctgccctcaagggcgccaagcagatcggcttcaccctgatttccctgacgctttcgttgatcgccgtgctgatcccgctgctgttcatggctgacgtagtcgggcgcctgttccgcgaattcgccataaccctggcggtggcgatcctgatttccctggtggtgtccctgaccctcacgccgatgatgtgcgcgcgcttgctcaagcgtgagcccaaggagcaagagcaaagccgcttctacaaggccagcggcgcctggatcgattggttgattgcgcgttacgggagcatgttgcagtgggtgctcaagcaccagccgctgaccctgctggtggctatcgccaccctgggcctcaccgtattcctgtacctggtggtgcccaaggggttcttcccggtgcaggacaccggcgtgatccagggcatttccgaggcgccgcaatcaatttccttcgccgccatgagccagcgccagcaggaactggccaagatcatcctggccgatcccgccgtggaaagcctgtcgtcctatatcggtgtggacggcgataacgccaccctcaacagcggccgactgctgatcaacctcaaggcccacggccagcgtgacctgagcgcggcccaggtgatcacccgtttgcaaccggaaatcgacaagctggtgggcatccgcctgttcatgcagccggtgcaggacctgaccatcgaagaccgtgtgagccgtacccagtaccagttcagcatgtcctcgccggacgccgaactgctggcgttgtggagcgacaagctggtgcatgcgctcagtcagttgccggaactcacggatgtggccagcgacctgcaggacaaaggcttgcaggtgtacctggtgatcgaccgtgatgcggcctcgcggctgggtgtgagcgtgtcgaccatcaccgatgcgctgtacgacgccttcggccagcggcagatttccaccatctatacccaggccagccagtaccgcgtggtgttgcaggcccagtccggcgaaacccttgggccggacgcgctgaaccagatccacgtgaaaaccaccgatggcggccaggtgcgcctctccagcctagcccacgtggaacagcgccaggcgcagttggcaattgcgcatatcggccagttcccggcggtgatgatgtcgttcaacctggcccccggcgtcgcgctgggcaaaggcgtggagctgatcaaccagacccagaaagacatcggcatgccggtgggcgtgcaaacccagttccagggcgcggcccaggcgttcgaagcgtcgctgtcgagcaccttgctgctgatcctggcggcggtggtcaccatgtacatcgttctcggtgtgctctacgagagttacattcacccgatcaccattctctcgaccttgccatcggcggcggtaggggcgttgctggcgttgctgctcagcggcaatgacctgggcatgatcgcgatcatcggcatcattttgttgatcggtatcgtcaagaaaaacgcgatcatgatgatcgacttcgccctcgacgccgaacgcaaccagggcctcgacccgcagactgcgatctaccaggcggcgctgctgcgcttccggccaatcctgatgaccaccctggcagcgttgttcggcgcggtgccgttgatgctggccaccggttccggcgcggaattgcgccaaccgctgggcctggtgatggtcggcgggctgctggtgagccaggtgttgacgctgttcaccacgccggtgatctacctgtacttcgatcgcctcggccgccgctggcgcaaagagccgcaaagcctggagccggttgagtcatgaacctgtccggacctttcatccgccggccggtcgcgaccatgctgctgagcctggcgatcctgttgctcggcggcgtcagcttcaacctgctgccggtatcgccgctgccgcagatcgattttccggtgatcgtggtgtcggccagcttgcccggcgccagccccgaagtgatggcgtctaccgtggccacgccgctggagcgctcgttcggcgcgattgccggcatcaccaccatgagcagttcgtcgagccagggctcgacccgggtgatcctcgcgtttgactccgaccgcgacatcaacggcgcggcgcgggaagtgcaagcggcgatcaacgcctcgcgcaacctgctgcccagcggtatgcgcagcatgccgacctacaagaagatcaacccgtcccaggcgccgatcatggtgctgtcgctgacctcggacgtgctgcagaagggccagctgtacgacctggcctcgaccatcctgtcgcaaagcctgtcccaggtgcccggcgtcggcgaagtgcagatcggcggcagttccttgccagccgtgcgcatcgaactggaacccaaggccctcgaccagtacggcgtggccctcgatgatgtgcgcaacaccatcgccaacgccaaccagcgccgacccaagggttccctggaagacagcgagcgcaactggcagatccaggccaatgaccagttggaaaaggccaaggactacgagccactgctgattcgctaccagaatggcgcagccttgcgtctgggtgatgtggccaagatcagcgatggtgtggaagaccgctacaacagtggtttcttcaacaacgactcggcggtactgctggtgatcaaccgccagtccggcgccaacatcatcgagacggtgcgacagatcaaggcgcagttgccggcgttgcaggcggtgttgccgtccagcgtcaagctgagcctggccatggaccgctccccggtgatcaccgccaccttgcatgaagccgagatgaccttgctgattgccgtggggctggtgatcctggtggtgtacctgttcctgggcaatttccgcgcctcgctgatcccgacgctggcggtaccggtgtcactggtgggcaccttcgcggtgatgtacctgtacgggttctcgttgaacaacttttcgctgatggcgttgatcctggccaccggcctggtggtggacgatgccatcgtggtgctggagaacatctcccggcacattgacgaaggcgtgccgccgatgaaggcggcgtacctgggcgcccaggaagtcggctttaccttgctgtcgatgaacgtatcgctggtggcggtgttcctctccatcctgttcatgggcgggattgtcaccaatctgttccgcgagttttccatcaccctgtcggcggcgatcattgtgtcgctgattgtctcgctgaccctgaccccgatgctctgcgcgcgctggctcaaaccccacgttaaaacgcagatgaccggtttgcagcgctggagccagaagatcaacgatcgcatggtctccggctacgccaccagcctggactgggtgctacgccatcggcgcctgaccctgctcagcctgttgctgaccatcggcatgaacgtggcgctgtacgtggtggtgccgaaaaccttcatgccgcaacaggacaccgggcagttgatcggctttgtacgcggtgacgacggcctgtcgttcagcgtgatgcagccgaagatggagaccttccgcaaggcggtgctcaaggacccggcggtgctcagcgtggccggcttcattggtggcaacaacggcaccaacaacgcggtaatgctggtacgcctcaaacccatcagcgagcgcaagatctctgcccaggcggtgatcgagcgtctgcgcaaggacgtgccgctggtgccgggcgggcggttgttcctgatggccgaccaggacctgcaattcggtggcagccgcgaccagaccagtgcgcagtattcctacatcctgcaaagcggcgacctggcggcactgcgcctgtggtacccgaaagtggtggcggccctgcgcgagttgccggaactcaccgccatcgacgcccgtgaaggtcgcggtgcggcgcaggtcacattgattgtcgaccgcgaccaggccaagcgcctggggatcgacatgaacatggtcacggccgtactgaacaacgcctacagccagcggcagatttccaccatctacgacagcctcaaccagtaccaggtggtgatggaggtcaaccccaaatacgcccaggacccgatcactctcaaccagatgcaggtgatcacgtccacgggggcacgggtgccgttgtcgaccattgcccattatgagaacagcctggctgacgaccgcgtcagccacgaaggccagttcgcttcggagaacatcgccttcgacatggcgcccggcgtgacggtggagcagggcacggccgccatcgaacgggcgatcgccaaggtcggcttgccggaagatgtgatcgccaagatggccggcaccgccgatgccttcgcggccacgcagaagggccaaccgttcatgatccttggcgcgctggtggcggtgtacttggtgctgggcatcctgtacgaaagctacattcacccgctgaccattctctcgaccttaccctcggcgggtgtcggcgccatgctcgccatctacctgacgggaggcgagttcagcctgatctcgctgctgggcctgttcctgttgatcggggtggtgaagaaaaacgcgatcctgatgatcgacctggcgctgcaattggaacgcaatgaccgcatggggccgcttgaatcgatccgcagtgcttgcttgttgcgcttgcggccgatcctgatgacgaccctggcggccatcctcggcgccttgccgctgctgctgggtgccggcgatggcgcggaaatgcgccgtcccctgggcctgaccattatcggcggcctggtgttcagccaggtcctgaccctttacaccaccccggtggtttacctttatctcgaccgcgcgcgccatcgcttcaacgcctggcgcggcgtgcggaccgatgctgccctggacactgcgctatgaccgattcaacctttgcccgattggccctgttccggggctcccgcgtggcgagcctggtgctctgcggcgtgttgctcagcgcctgcgccgtcggccccgactacaaacgcccggacgtggtcgagccggcgcaattcaaggaagccaaggggtggcgccaggccacccccagtgattccctggcccgtggtgcctggtgggagttgtacggcgaccgccagctcaatgacctggtgctgcgcctgaacagttccaaccagaccgtggcccaggccgaagcgcgtttccgccaggcccaggcgttggtgcgcagttcccgtggggcgttttaccccaccgtcgacctgagcgcggggaaaacccgggccagccagggcaccggcagcagcagcgcgagcctgagcagttccagcagcggcattcgcgacaccctcaacgcacagttgggtgtgagctgggaggcggacatctggggcaagttgcgccgtggcctggaggccaacgaggccagcgccgaagccagctcggcggatttggcagcgatgcgcctgagccagcaatcggaactggtgcaaagctacctgcaactgcgcgtcatggatgaacagacgcgcctgctgcaagcgaccctggagacctatcagcgctccctgcaaatgaccgaaaaccagtaccgcgccggtgtttccggcaaggacgcggtggcccaggcgcaaacccagctcaagaccacccaggccagcctgatcgacttgatctggcagcgcgcccagctggaaaacgcaattgcggtgttgatcggcgaggcgccggccaacttcaacctggcggtcagcaaagacatcccggcactgccgcagatcccggtgagcctgccgtcgcaactgctggaacgtcgcccggacatcgcttcggccgaacgctcggtgatcgccgccaactccaatatcggcgtggccaaggcggcctactacccggacctgaccctgagcctggccggtggttattccagtagcacctacgccgactggatcagcctgccgaaccgcttctggtcggtggggccgaagctggccatgaccctgttcgatggcggccagcgctcggcggaagtcgaccgcaccgtggcctcctatgacgaaaccgtcgccaagtaccgccagactgtgctggatggtttccgtgaagtggaaaactacatggtgcaactcaaggtgctggaggacgaggcggtggtcagcaacgaagcgctggcggcagcacgcgagtcgctgcgcctgacccagaaccagtacaaggccgggctgattgcctacctggatgtggttaccgtgcaagccacggcgttgagcaacgagcgcacggtgctgaccttgctgcagacgcgcctggtggccagtgtgcaactgatcgccgccttgggcggcggctgggatggacagacgccgattgccgacaaaaattaacgatgaactcgatccaatgagcgggcttgctgtagtgagcgggcttgccccgcgctgagccgcgcagcggccccaaaaaacgggagcgctacgcactccagcgcggggcaagcccgctcaccacaataggtccgctcaccgccatatttgacctcagcaaaccctcgtttctgagccataggattggcgtcaaaatgccactaatggcgctctgataattaatcaactgttcaagaattattctcgctacaatcgcccgctttgccatttcgcacgggcctctcgggccctttgtgcacgagaagtcccatgctcatcggtagttattcgccctcactggtcgtgatctcactgttcgtcgcgatcctcgcttcctacaccgcgctggacctttccgggcgcatcgccaccgccaaaggccgcgccgtctatatatggatcattggcgggtcgatggcgatgggggtgggggtgtggtcgatgcacttcatcggcatgctggctttgcgcttgccgtttgccctgggcttcgacctggggattaccgcgctgtcgttgctgattgcggtgctgtccagcggctttgcattatggctggtcagccaaccgcgcctgccggcctggcagttggggttgggtgcgctgatcatgggcaccggcattgccagcatgcattacaccggtatggcggcgatgcgcatgacgccgggcatcgactacgacccgacgttgtttggcgcttcgttattgatcgcggtggtggcctccggcgcagcgttgtggatcgcccataatttgcgccgcaatacgccgtatgtgcgcctggcccgtggtggagcggcggtggtgatggggtttgctatcgtcggcatgcattacaccggcatggcagcggcccgctttgccgatgaaagcttctgcggcgcggcactgaacgggttgagcggcaagggtctggataacctggtgctggtcaccaccctggcggtgctggccatcgctttactgacttcgttgctcgacgcacgcctggaagcgcgcacggcggtactcgccgactccctgagccaggccaaccaggagctgacccacctggccctgcacgacatgctcaccggcctgcccaaccgcaccttgctcgccgaccgcatccagcaagccatgcaggcggtgaaagagcagggcggctgctttgcgctgatgtttatcgacctggacggcttcaaaccggtcaacgatgcttttggccatcatatgggtgaccagctgttgcgcgaggtcggcctgcgtctgcgtgaagacttgcgcagccatgacaccctggcgcgcatcggcggcgatgagtttgtgttgctggtgcaattgacccagccggacgacgccctcggccttgccgaacgccaagtggtgctgatcaaccgtgcgttccaggtggccgagcatgagctgaagatttccgccagcgtgggcatcgccattttcccaggcaacggcaacagcccccaggaactgctgatgaacgccgacgcggcgatgtaccacgccaagggcgtgggcaagaacggctacagctttttcgatgcgtcgatgaacaccaacgcgcgcaagcaattgcagttgttgcaggacttgcgcaatgccgtcgagcaacaacaattccgcctgtactaccagcccaagttcgacgcggccagtggcattgcggtgggcgccgaagcgctgttgcgctgggagcatccacagcagggcctgttgttgccggcaacctttatcgaactggcggaaaagaccgggttgatcatccccatcggggaatgggtactggatgaagcctgtcgccaaatgagcctgtggtacgcccagggctacgaagattggcgcatcgccgtgaacctgtcggcgctgcagttctgccacgccgggctggtcaagagcgtggccgaggccctggaacgtcatcggttgccggccaatagcctgaccctggaaatcaccgagaccaccgccatgagcgatgccgatgcgagcatgacggtgttgcagcagttgtcggacatgggcgtcgatctgtccatcgatgacttcggtaccggttattccagcctgatgtacctcaagcgcttgccggccaacgagttgaagatcgaccgtgggtttgtgcgcgacctggagcacgacagcgatgacgccgccatcgtctcggccattgtcgccctcggccaggccctgggcctgcgaattgttgctgaaggggtggagaccgatgtgcaacagagctttctcacgcgcctggggtgtaactccctgcaaggttacctgctgggccatccgttgccggcggacggattcatggccgacatccagcgtgccgaagacgcgcttgcgcctgacaaaagccgtgcgtgacgggtattcttggatccagccctaaacatcaggttgaatcaggagaccgcacgcatggacaaagtcgtcatcatcaccggaggcagtcgtgggatcggcgccgagacggcagtgctggccgctcgccagggttaccgcatctgcatcaactaccagtccgacgaagaggctgcccaccgtgtgctcgaacaagtccgcgcgctgggcgcccaggcgattaccgtgcgcgccgacgtgagcattgaagatgaagtgattgcgctgttccaccgcgtcgacaccgaactgggccgtgtcaccgcactggtcaacaacgccggcaccgtgggacacaagtcccgtgtggacgaaatgtccgagttccgtatcctgaaaatcatgaagaccaatgtgctggggccgatcctgtgtgccaagcacgcggtgctgcgcatgtcgcccaagcatggcgggcagggcggcagtatcgtcaatgtatcgtcggtggcggcgcgcctggggtcgcccggtgagtatgtcgactatgccgcctccaagggcgcgctcgataccttcaccattggcctatcaaaagaagtggcgggtgagggcattcgcgtcaacgcggtgcgccctggctacatctacaccgacttccatgccctgagcggcgacccggaccgggtcagcaaactcgaatccggtatccccatggcccgtggcgggcgcccggatgaggtggctgaagcgattatctggctgctgtcggacaaggcgtcgtatgccactgggacgttcctcgatctgggcggtggccgctgaagtccgggcattcatgcgcccaggtttcttagcacctcgtagccctgttccgcaaaggccaccagcaagcgtgcctccgagtttttacgggtggaatagcccgcattgtgaaaaccgttgattttgccatcgcggctttcgctgttgcccactgtgcggtcattcacgttatccagaaagttgaccacccgagccaggttgtaggctgcatcggcgcgcgaacgggcgctgggattcgcggaagtccagtcacccaattgacgtttgagcaggtcggtagtggggtagctgtctcggcgccgtaatagatgtttgaccgccggattggcgttgataatctgtttggcgctacggtggtcgccggatggtcgaccttccgggtggttgggagcattgcgccaattctgctccgtgaggtgtagggtgattgcagggctattgttggtgtacatgaggaactcggtatcaaggagaagtcactggttggcatcatgccgggttaggtcccagtgactgtgttacaactaaaacgaccgcacaatccgccccaacgtctccatcgccttttccgacgcctcggtccacgggctaccgtagttcaggcgaatgcagttcctgaagcgctgggtcgccgagaagatcggccccggcgcaatgctgatgccctgcgccagggccatctggaacaacttcaacgaatccgtctgctccggcagctccagccacaggaagtacccaccggccggttggctgacccgcgtctgtgccggaaagtagcgcgcgatcgccgccagcatggcgctttgctgttcttccagggcatagcgcaacttgcgcaagtgccggtcatagccgccgtgctgcagataatcggcaattgctgcctgggctggcatggaggggcacagtgacgtcatcagtttcaggcgttcgaccttctgcgcaaaacgcccggccgccacccagcccacgcgatagccgggagccaggctcttggcgaaagaaccgcaatgcatcaccaggccatctgtgtcgaaggccttcgcgggtttaggggcctgttgcccgtaatacagttcggcgtacacatcgtcttcgatcagtggcacctgatgctcgcgcagcagttccaccagcgcctgctttttcgcctcgggcagcgtcgcgcccatggggttctggaagctggtcatggtccagcacgccttgatcggatagcgctgcagggattgcgccagggcgttgaggtcgatgccgtcgcgcgggtgcaccgggatttccacggccttgagtttcaaacgctccaacacttgcaggcaggcgtagaacgccggggcttcgatggccaccaggtcgcccggttcggtgacggcttgcaggcacaggttcagggcttccagagcaccattggtgatcagcagctcctccatgggcagcatcaggccgccgaccatgtagcgcagggcgatttgccgacgcagttgcgggttgcccggcgacatgtcggtgaccaccaggcgcgggtccatttcgcggctggcgctggccagggaccgcgccaggcgcggcaacgggaacagcatcgggcttgggaacgccgagccgaagggcacagtgttagggtccttgatcgagtcgagcaccgagaacaccagctcgctcacatccacttcggtggactcatgcacttgctcgctcaccaccggctcggaaaacgggctgggcgcgtgggtgttgacgaagtagccggaacgcggccgtgcacggatcaggccacggcgctccagcaggtaataggcctggaacaccgtagacgggctgacgccgtaggtctggctggcatagcgcaccgagggcacccgctggccggggccgagcacgccggagcggatcagttctgcgatgtcgtcggcaaatttttcgtagcgtttcatgaggacctgattagcctttcaaatgtgttttcagcggttcagcggtgccacaaagcggctgtcggcagcactgtagatccacggctcgtccacatccgagaccttgaagcgcaaggtctgcgagctgctcgccggtttgtccgccagcaatgccaccgacaccggcacgtcgctgatttcccccggtgccaggctgatctcggtcttgccctgcaactggaagccctgcgcgtccaccagttccagacggtagtcctggcgctgctgggtcttgttgatcaccttgaggctgtagatgttttcgatcaggccctgtgcgttttcgcggaacatgccacggtccttggtcacgtccagcgagaccatcggccgttccaccaaggccaccaccagggctgcgatcatcaccagcagcaccgcactgtagccgatcaggcgcgggcgtagcaggtgggtcttgccgccttgcagttgatgttcgctggtgtagctcaccaggccgcgggcgtaacccatcttgtccatgatcgaatcgcaggcgtcgatgcacgccgcacaaccgatgcattccatttgcaggccgtcgcggatgtcgataccggtagggcagacctgcacgcacagctggcagtcgatgcaatcgcccaagccgacatcggcgggtttcacttcacgtttgcgcgggccacggtgttcgccgcgagccgcgtcgtaggaaatggtcagggtgtccttgtcgaacatcacgctctggaaccgcgcatacgggcacatgtgcatgcacaccgcttcgcgcaaccagccggcgttgatgtaagtggcgccggtaaagaacagcacccagaacaggctgacgccgcccatctgccaggtcagcagttcgctggccagggggcggatcggcgtgaaatagccgacaaaggtcagcccggtcagcacactgatgcctagccacaaggtgtgcttggccgagcgccgcgccagtttgttcaagctccagggcgcggcttgcagtttgatgcgctggttacgttcgccttcggtgactttctcgcaccacatgaacagccaggtgaatgaactttgcgggcaggtgtagccgcaccacacacgaccggcgaacacggtgatcgcaaacaggccgaaagcgcaaatgatcagcaaggccgacagcaggatgaagtcctggggccaaaaggtcgcgccaaagatgtggaatttgctttcagccaggtcccacagcaccgcctgccggccaccccagttcaaccagaccgtgccgaaaaacgccaggaacagcaagcccgcgccgctcacccgtaaggtgcggaacaggccagtgaaactgcgggtatgaatcaggttgtcgctggatttggccttcaccttctttgggtgtatgggctcaaaggtttccacggttgggattctttcgctcatggtcgttcgctcatcagcctccatcaggccgatgaactatgcgcgggacactgtttgcataacagactcaggtagagtgataaaaagcggatcagatgggctgcgtgcggcgtgctgcgacaatgtgctgcaccctgtgtcgcctagagtgcagcgctgcaacgtgtgtgttgatacagatcaatcaaatcagcgaaccaggtttttcggcctttacatgctggcgtccatcgtgggccccggcgaccgtcagggcgtcggcctcggcttcagtgatatagatccgctcggcggccaactccacgtaggacatggatttgtcggtgtcggtcgcgatattgacccgcgtcgctggcacgctctgttcctggccgttgtcgtcgagcatgaagtagcacagttggttttcgatacgaatgggcatgccgatctcctttctcgtggactatgcaaggttaggggccggcgatgtgcaggggttccaggcaactgactggcggtcgccgctgtccatcctttaccaataacgataaaggacggcatccatggacgcctggtggcatgaagtgtggcaaaccctgctggctgaattcgccgacatcggcgacgccaggcagcttactcagatcaccgtgcgcctgctgatcgccgcagtgctgggcggtatcctcggctttgaacgcgagagcaagggcaaggccgccggggtgcgcacccatatgctggtggcgttgggtgccgcgttgtttgtgatggtgccgcagatgtccggaaatcaggcggacgcaatgagccgggtggtgcagggggtgatcgcgggaatcgggttcctcggtgccggcaccattctcaaaggcaatgaggatgaagagggccagcacgtcaaaggcctgaccacggcagccgggttgtggatgaccgccgccattggggtagcggcggggttgggacgcgagtcgaccgctgtgctcagtactttattggccctggtggtgttcaatgtgatgccgaggattgtcaagctgctggagaagaaaactgggtaacaaggtctggtcaggtgaccagattttgataacgcagctcgccaaacaccttgatcaccatagggggggttccgggatcgttcgccacgatgagcacgcttgtccgggtgctcggcaggtaatggatttgcatttcaccacgggctccagaaaatttttccaccaggtgcaatggcgtgttcagctgtttttggatgttggtcaggtcgattttgtcgttgttgttaaagtttttgatttcgctgggcgcattcaatggggactcgctgagcgaaccataacggtaggttttggcgtcagcgttatagggtgtattggcaggtgatgagcgcagcgtcgcgttcaactgtgtgcccatctcctcaatttttttggctgttgcctcgattctggaaaatttttgcttgaggtcggcaaggccattttgtgcgttgttcatgtacgcaacgctatcccccaccccgtcgctatcaaatgcctttgcaatctgagagaaattgtcgagctcgatttgttgtatatgcctttctctcatctcgttgatgacttttttggcctgtgcggtgatcttgtcatgggacaactggttgacggatgcccaaggcgtcttggcgtttgccgccgagtgaggggtgttcatcgcgatttcgttcgcaagcttcttggaccgttcaagtaattccttgctttggttggaatctggttcgcgcaacatcttttcgatgttggtttcggtcaacagtgtttcaagttcgctcgccgcgttgcgcgcctcgggcccagaagatgctcgaggtgcgggtgtgttcggtgccggctcgggctgtttgtggggcatggaacaattggggccagactttagcagcccattgatacgctcagacgtcagcccaggttggccgggcgtggagttggatagtgtgggctgcacgccgggcgatgagcggccctgctggggatagatagtcgacattgattcatcctcgtgaggcttgtggttgcacgatatagccaaggcggtggttatgcgccctcgcgggatgagtgtaagagtgagtggcatcgctagagcttaggacgggtctgacagctgagtgggaatttttacttttctcaaccgttcgcccgtgcgcctgaagcaatgtctgcgcacgagcgagccctccacttctgacaatgttcagacaatcaccggcggcatcgttgttggcggctcctccaccgacggcggcgggttttccggtggctctttttccggaatcggttctggctcggtcggtggcaaggtcgggttatcgatattcgggtccggggtttcagccgggatcgggatattcatcggtgtggcctcctttgtgctttgctctatcggtggacacccgccagggcgaattgattccccgcccaatggcggcacatccacctgaacttttaaccggcacgcaggctcggacctatgacggctctgctcagggagagcgctgccgtatcagaatttcggatcaagcaaagagcgtccacagggcgtaaggggaagatgctcgatgactgctgaaacacaggttccagacccatccttattgccgctgtcccaggcgctgttgctgccacggatcgcgatcgaaagcaccacccccgtgatcgacggcggcgaatttgccgtcaaggccgtggtcggccagcgggtcaacgtcaccagcaaggtgttcgccgacggccatgacaagctggccgtgctgatccgctggcgcccgttgcaagacgaaagttggcacagcgtggtcatgaacgacgtgggcaataatggctgggagggcgcgtttaccgtggcccagcaaggcccccacgagtactgcatcgaagcctggatcgacaccttcgccagcttttgctacgaactgcgcaagaagcacgaggccggtgtgccggtcagcctcgagctgcaagaaggccgcagcctggtgctgcaggccgccgagcgcagtgacaacgagctgcgcgaccgcctgatgctgctgcaccacgaactctccgggctgctggaaaccgagcaggttgcgcagttcctgcacgaagacagtgcacatttgatgacccaggcagatcaccgcgcctacctgagcatcagcacggtgtacccgatcgatgtggagcgcgaagcggcattgtttgccagctggtacgagctgttcccgcgctcgatcactgacgatcctgcacgccacggcacctttaatgacgtgcattcacggctgtcgatgatccatgacatgggcttcgacgtgctgtactttccgccgatccaccccattgggcgcagccaccgcaaaggcaagaacaactcgctgaccgccggccccgatgatccgggcagcccgtatgcgatcggcagcgaagagggcggccatgaagccattcacccgcaactgggcagccgcgacgacttccgccgcctggttcaggccgccgccgagcacggcctggaaatcgccctggacttcgccatccagtgttcccaggaccacccatggctcaaagagcatccgggctggttcaactggcgcccggacggcacgatcaagtacgcggaaaacccgccgaaaaaataccaggacatcgtcaacgtcgacttctacgcggcggatgcgatcccgagcctgtggaccgagctgcgcgatatcgtggtgggctgggtggaagagggcgtgaagacctttcgtgtcgacaacccccacaccaagccgctgccgttctggcaatggctgatcagcgatgtgcgcgcccggtaccccgaggtgatcttcctggccgaggcgttcaccacgcccgcgatgatggcgcgcctgggcaaggtcggctactcccagagctacacctacttcacctggcgcaataccaaggccgagttgagcgagtacctgacccagttgaatgaatcgccgtggcgtgaatgctaccggccgaacttcttcgtcaacacaccggacatcaaccctggcttcctgcacgagtcggggcgcgcgggctttttgatccgcgctgcgctggcaaccatgggctcgggcctgtgggggatgtattcgggttttgaactgtgcgaagcggccccggtgcccggcaaagaggaatacctggattcggagaaatacgaaatccgtccacgggatttcaccgcccccggcaacatcatcgccgagatcgcccagctcaaccgcattcgtcggcagaacccggcactgcagacacacttggggctcaagctctacaacgcctggaacgacaacatcctgtatttcggcaagcgcagcgaggatggcagcaacttcattctggtggcggtcaacctggacccttacaacgcgcaggaggccaacttcgagttgccgctgtgggaattggggctgccggacgatgcccagacccagggcgaagacttgatgaatggccaccgctggacctggtatggcaagcaccagtggacacggctggagccgcagatgccgttcgggatctggcgtatcaccacctcttaagccccgcgcggtcaatgtgggaggggcggtgcgacgattcgacttgcccccgattgcggtgtgtcagccacagcttcatcaactgacacaccatcatcgggtgcaggtcgagtcgtcgcactgcacctcccacattgaccgagtggttcaagtatttcaggagtttccaatggcgaagaaacccaacgctgccaccttcatcaaggacccgctctggtacaaggacgcggtgatctaccaggttcacgtcaaatcctatttcgactccaacaatgacggtatcggcgactttcccggcctgatcgccaagctcgattacatcgccgacctcggcgtcaacactatctggctgctgccgttctacccctcgccacgccgcgacgatggctacgacatcgctgaataccgaggcgtacacagtgactacggcaccatggccgacgccaagcgcttcatcgccgaggcgcacaagcgcggcctgcgggtgatcaccgaactggtgatcaaccacacctccgaccagcacccctggttccagcgtgcgcgcaaggccaagcccggttcggctgcgcgggacttctacgtgtggtcggatgacgaccagaaatacgacggcacgcgcatcatcttcctcgataccgagaagtccaactggacctgggacccggtcgccggccagtacttctggcaccgtttctactcgcaccagcccgacctcaacttcgacaacccgcaggtcatgaaagccgtgctgtcggtgatgcgctattggctggacatgggcatcgacggcctgcgcctggatgcgatcccctatttgatcgaacgcgatgggaccaacaacgaaaacctgcctgagactcacaacgtgctcaagcagatccgcgccgagatcgatgcccattaccccgaccgcatgttgctcgccgaagcgaaccagtggccggaagacacacagctgtacttcggtgacaaaaagggcgacgacggcgacgagtgccacatggctttccactttccgctgatgccgcgcatgtacatggccctggcccaggaagatcgcttcccgatcaccgatatcctgcgccagaccccggagattcccgccaattgccagtgggcgattttcctgcgcaaccatgatgagctgaccctggaaatggtcaccgacaaagagcgcgactacctgtggaactactacgccgccgaccggcgtgcgcggatcaacctggggattcgccgccggctcgcaccgctgatggagcgcgaccgccgccgtgtcgagctgctcaacagcctgctgctgtcgatgcccggtacgccgaccctgtattacggcgatgaaatcggcatgggcgacaacatctacctgggtgaccgcgatggcgtgcgcacgccgatgcaatggtccatcgaccgcaacggcggtttctcccgggccgacccggccagcctggtgctgccgccgatcatggacccgcaatatggctatcagtcggtcaatgtggagacccaggcccaggacccgcattcgttgctgaactggacccggcgcatgctggcggtgcgcaagcagtccaaggcctttggccgaggcagcctgaaaatgctctcgccgagcaaccggcgcatcctggcctatacccgcgaatttaccggtgaggacgggcgcaacgagatcatcttgtgcgtggccaacgtgtcgcgcagtgcccaggcggcggagctggacctgtcggcgtttgccgggatggtgccggtggaaatgcttggcggtaatgcgttcccgcccatcggccagttgaatttcctgctgaccctggcgccctacggtttctactggtttgtgctggcgccggaaaaccagatgcccagctggcatgtggaaccggctcagagcatgccggacttcaccacattggtattgaaaaaacgcatggaagaactgctggaagaaccttgccgagcgtccctggagcagaccgctctgccagcgtggttgcccaagcgccgctggttcgctggcaaggacacggcgatcgacagcgtgcgcattgcctacggcgtgcgatttggcgacgcgcagcatccggtgttgctcagtgaagtcgaggtgacggccgcaggccaggtcagccgttaccagttgccgttcggtttccttggcgaagatcaattcaccagcgccttgccccagcaattggcgctggcccgagtacgtcgggtgcgccaggtggggttggtgaccgacgccttcagccttgagcacttcatccgtgcggtgatccagggcttgcaggcgggcaccgtgctggagaccagtgacggcgagctgcgctttgctgccacaccgcatttggccaagctgcaactgacggatgaggcggaggtgcgttacttgtcggccgagcagtccaacagctcggtggtggtgggcgagagcctggtgctcaagctgatccgcaaagtcgcctccggcgtacacccggaactggagatgagtgcttatctgacagctgcgggctacccgaacatttcgccactactggggtcgatggtgcgccacgacgccgagggcgaggacaatctgctgatgattgcccagggctacctgagcaaccagggcgacgcctggagctggacccagaacaacctggagcgggcgatccgcgacgaactggccgaggccatttccgagcaggaacaacactacaacgccctgggcgagctggccgattttgccggcttgctcggccagcgcctcggcgaaatgcaccaggtgctcggcgccaaaactaccgacaaggccttcaaacccgaagtcaccacggccaaggacacccaggcctgggccaaggatgtcggcgcgcaactggaccgtgcgctgcacttgctcaaacttcatcaaagccagttgaacccggcggatcaagtgctggtcagtgatttgctggcacagaaaaaagccatcgccagccatgtacaggctttggcgaaagccacggcgggcgggttgcgcatccgtgtgcatggtgacttgcacttgggccaggtgctggtggtgaagggcgatgcttacctgatcgacttcgaaggggagccggcgcggccattgcatgagcgacgtggcaagcacagtccgtacaaagatgtgagcggtgtattgcgctcattcgactatgcggcggcgatggccctgaatgttcaaggggtggatcactcgcccgaggcggaccaggcgcgcagacgcgtgacagagcgttacctcaaggaagcacgccaggcctttatccgggcttatcaggcggcgacggctacactggcgcatgactggcaggatgccaaaggccaggacgccgcgctgacgttgttcagcctggagaaggccgcgtacgaagtggcttacgaagcagaaaaccgcccaacctggttgccggtgcccctgcaagggttgcacggattgttgagcggtatcgcacctatatcgaacactgcacgcggtggggagacgtcatgagctttacacataaagaaccgctgcaaccgaaactgactgcattgccggcgtccaaggacgtcgaagcgctggtccgcgccgaacaccacgacccgttctcgattctcgggccacacgatgatgatcacggcggccagtttatccgtgcattcctgcccgaggccttgagtgttcaggtgctggcccgcgacagtggcgaggcgctcggcagcctggacgcgagccaggtgccgggcctgtttgtcggccagttcaagacccgtcagccgtacctgttgaaaatccagtgggctggtggcgagcagattaccgaagacccgtacagcttccagcaactgctgctgggtgagatggacctgtacctgttcgccgaaggtaatcaccgcgaccttggcagttgcctgggcgcccaggtgaccagcgtcgatggcgtggcgggcgtgcgctttgccgtgtgggcgccgaatgcgcggcgggtgtcggtggtgggcgacttcaatatctgggacggtcggcgtcatccgatgcgcttgcgccatccttccggcgtgtgggagatcttcatcccacgcctgcaaccgggtgcggcctacaagtacgagattctcggtgcccatgggatcctgccgctcaaggccgacccagtggcgctggccacccagttgccgccggacactgcctccaaggtggccgaaccgttgcaggtggactggcaggatcatgaatggatgcaggcgcgggtcgataagcagaaggccaccgcgccgttgtcgatctatgaactgcacgtgggctcctggcagtgcgagttggacgaggcgggcgaagtggcccggcaatacaactggcgtgagctggccgaacgcctgattccctatgtgcagcaactgggtttcacccacgtcgagctgatgccgatcatggagcatccgttcggcggttcctggggctaccaggcgttgtcacaatttgctcccacggcgcggttcggttcgccgcaggatttcgcctacttcgtcaatgcgctgcaccaggccgatatcggtgtgatcctcgactgggtgccggcgcattttcctaccgatacccacggcctggcgcaattcgacggcactgcgctgtacgaatacgccaacccgctggaaggcttccaccaggattgggacacgctgatctacaacctgggccgcaccgaggtgcacggcttcatgctggcttcggcgctgcactggctcaagcatttccacattgacgggctgcgcgtggatgccgtggcgtcgatgctctaccgcgactattcgcgcaaggccggcgaatgggtgcccaaccgccatggcggccgtgagaatctcgaagccatcgacttcctgcgccatctgaacgacgtggtggcccaggaagcgccgggtgcgttggtgattgccgaggaatccaccgcctggccgggcgtgagccagccgacccaacagggcgggctgggcttcaactacaaatggaacatgggctggatgcacgactcactgcactacatccagcaggacccggtgtaccgtgcccaccatcacaacgaactgagtttcggcctggtgtatgcctggtccgagcggttcatcctgccgatctcccatgacgaagtggtgcatggcaagcactcgctgatcgacaagatgcccggcgaccgctggcagaaattcgccaacctgcgcgcctatctggcgttcatgtggatgcatcccggtaagaaactgctgttcatgggctgcgaattcggccaatggcgcgagtggaaccatgaccagcaattggactggtacttgttgcaatacgccgagcacaaaggcgtgcaaaagctggtgggggacttgaaccggctgtaccgcgaagagccggccttgcatgaacaggacgacgcaccccagggcttccagtggctgatcggcgatgacgcgatcaatagcgtctatgcctggctgcgctggagcaaggacggtaagccggtgctggtggtggccaacttcaccccggtgccgcgtgagggttacgccgtcggtgtaccttttgctgggcgctggagcgaagtgatcaacagtgacgccgatatgtacgcaggttccaattacggtaatgggggcgaggtgttcacccaggatgagccccgtcatggtcaagcggtgtcgctgtcgctgaatctgccaccccttggcgtgttgattctgcgtccggaagcgctttaaaggctctactgtgctggattctgttgtccacgctactggcagggtgccacaatggcgcctttgtcgtagcagtcgaatcgggcgaatttcatgaatggccttgggcgtgggcaggaccaggattgctttatagaggagcaggtgcggactgatcgtttgcaccagctgttccggcagtcatttgccgccatcttcggcagctacttgggcgccatgatgctctgctggctgtgttgggaccgctttgatcatcaagtcatgctgatctggctattgacgctggcagcctcgacgttgctgcgactgcagatgttcatggagtggtttcgttgccccaacgccgagcgcaccccggatcgctgggagcgccgctactggaccacgctgatgctgtcggccggtatctggggctttggcgcgttggcggtgatgcccaccgatgaccggctctcccaggcgctggtgatgctgttcaccgtgggcatgtcggtgagtgcagtgtcgtgttactcggcctatcgctatatgacgctggggtccatgggcctggttttactgccatgtaccctatggttgctgttccagccttcctctatgcaggtgggtgtggccgtcgcggtactggtgttttccacctttgtggtgagcgccacgcgcaagttgtccgatgccctggaaaaagcctttcgcctgacccggcaaatggagcgtgcccacaacatttccactcgcgccgcacagaccgatgaactcaccggcctgatgaatcgccgcgcctttttcgagcatgcccaggtgttgtacgaacaatgccgccacaatcgtcagccgctgtgtgcgctgatgatggacatggaccacttcaaggaaatcaacgacacctacggccaccaggccggtgaccaggtgttgcgccagattggcggggtgatcagcgcttcgttccgccaggctgatgtgtacggccgcctgggtggagaagagtttgcggtgctgctgcccaacacttcgctggaaaccgcacgggttatcgctgaacagttgatcaaggcaatctccggcctgtcctccgcgccggtgcatgggttgacggccagcctcggtgttgcgtccacccacactcaggatcaagacctgcacggcctgatgaatacggctgacaaggcgctgtatcgcgccaaggcccagggccgcaatcaggtggcggtggcggagtaagacttcaaattgtagcaagcgggcttctttggcaaccaggcctggtcgctagggcatcgccttggtcagtgcccgcgccacctgatcggccgagtagggcttggcaaggaactcgaacccttcgtagccgctgtcggccaactcttcgctgtagccggaagtcagcaccaccggcaagtccgggcgccgctgacgcagtaccttggccatggccacgccggtcatgccgggcatcaccacatccgaaaacaccccatcgaaggccagggcatcggcgccggccagggtcagtgcctgttcggcatcggtggcccaggtggtgcggtagcccaggtcctgaaggatctggttggcgaagcggcccacttccaggttgtcctccacgatgaggatatggcgctgcgctgcggtgtggaccggcgcaagatcttcctgctgctgcacgttgggcattgtttgcggggccacttccggcaggtacaaggtaaacaccgtgccctggcccacgcggctggccacgtcgacgttgccaccggactgcttggcaaacccgaacacctgggacaagcccaggccagtgcctttgccgaccgccttggtggtaaagaatggctcgaaaatgcgctcgaaggtatcgcccggaataccgctgccggtgtcggtcagggagacgctgacaaatggctggagtgcctgcgcatcgccgcggatgcacggcagtgcctcgagcgtggcgacgcgcagggtcagggtgccctggccgtccatggcatcccgggcgttgagggcgatgttgatcagggcggtttcaaactggctggagtcaacccgcacatggcaggggcgctctggcaattgcacctgtacgcggatgcgtgcgccggtgacgctttcgagcatctcggcgatgttcttgacccgctggcccgcatcgaagacttccgggttcagcggttggcgacgggcgaaggcgagcaactggctggtgagcttgctggcccgttccaccgtatcggacaccgcccccatgtaacgctggcggcgttcttcggacagcccaggctggcgcaggaagtccaccgaggaacgaatgatggtcaacaggttgttgaagtcgtgggccacgccgccggtcaattgaccaatggcttcaagtttctgggactggtgcaacgcagcttcggcctgggtgagggccgcggtgcgttcctgcacccgttgttccagtgtggcattgagttcggtgaaggctgccaggccttcgcgcacggcggcgtcagcgcgcacgcgctcgatgtgcgcccaggagcgctcggtgacttcgcccaccaacgccaggtcgtagggtgaccaggcccgaggcgctttgtcatgcacggccatcaacgccgtgagacggccgtgcttgatcagcgggaaacacacggtggccaatgcgcccaaggcctgatagctggcggcgtcttcaggggtgaactcgaggcgattgtcttgcaccaccagcggctcgccggcgcgcaggcgttgcaccgccaatgcgccgaacgaggccaggctgtaatggccgacgatgctcggcgagccgtgcgctgcccagttgccgcgaatggtaaaaccgtcttcgtcggcatccatgtcggcataggcgcagttggagacttgcaggtgctcggccagcaggcgggtggtggtggccatgatgtgttcggcatcggtggcggtggcgaccgcgttgccgatggtgtccagggctgccaggcgctgggtgagaaacacggtggtggtggtttcggtgaccgtgtcgagcatgccgacgatcttgccattggggtcccggatcgggctgtagcagaacgtgaaatacgcctgttcaggcccggcaccacgctcgatcaccaaggggaagttttcgatataggtcgcgtgcccttggaaggccgcgtcggcgatcgggctgacctggtcccagacttcgtgccaggtttcgctgaacgggcggcccaatgcgtcgggtttatcgcccaggatcggaataaacgcgtcgttgtagagcgtgatcaactgtggcccccagatgatggcctggggaaagcttgaggcaaagcacagtgcggccgtggtcttgagcacatccggccactgttccagcgggcccaggggcgtactcgcccaatcatgctggcgcacccgctcagccatctcgctgctgctttgcagccaattcatcattgcaagaacaccttgtttaccgcggtctgtttaacgcctggaagggagggcctgacaagcaacagaccggaaagcccgctggcagttcagcgggattatcgcggtgatagcaatttgatgcactatccgtatggatagatctgcaaacctgcttattgcgcgccgaaaaccgccgtccaataaatccctgcgtcactcttcgggtccatcgcataggccgcgcccagttcgcggaactgcgggttcatcaggttggcgcaatggcccgggctggcgagccaaccgtcgaccaccttgcgtggcgtgtccaggccggcggcgatgttttcgccgatgttcttcgcgatgtacccggccaactccgcacggtcgcccggtgtgcggccgtcgtggtcgaggtggtcgaagaagttgccgttggccatgttgcgcgtgtggctgttggcggcgccggccaggtcgtcattccacgacaacggcgtggtggcggtaaacgcctgggtgccgcattgccgtggctgagaccgcgcggtgttgatcaggttgagcagttgcctgccttcggtctgccagtcgcccaggccactggtcagcagcgggcgagcaagcacgatgcgccagtcctggccgctgttgctcacgccgatatcaacaaattgcgggtccagcaccacgcgacagaagctttcgcgcacggccttcatcgccgcctgggcatccttgggcccggacaggctgatggcctgcacgttgaccatcgggtacgcggcgcgtgccagcgcttgctgcaagtcgcccacattggtggccggcagcaccagccgtgtgtcgctggccagcggtggcagttcctgggaaccctggtcgccgcagcgctgcacctggctgcggtattggttgatctgttgtaccaactgactttcttcattcgccatcgcgctggcgcagaacaccgtactggcggccagcgtcgtaagacccatcatcaatgacagaacgcgcatggacgttacccttgagcttgaaagtgcccatgatgcgcgatgtaacccggtctggcgcaacgccttttttgtttttttgcctcaatgggtgttctggaggccgttacaagcgctgaagcgacgccatgccatcacactggccagcaggatcaaccccagcgccacgctgaacgtggtatgcaggccataggccacggactggggcagggcgcgggtcacgtccgggctggcccaggcgaacacggcacccagtacggacgtgccgacgatcaacccgagattgcgtgacaggttcagcagccccgagacagtgcctcgctgcgagctgtccacattgctcatgaccgccgtgttgttggcggcctggaacaggctatagcccgtcgtcaaaacgaccagcgaggcaaggtaggcgatcagtccggaccccagcgacaacaacagcgcaccacaggccagcactcccagcccggcgagtgtcacgcgttggctgccgaagcgatcggtgagacgtccggccggtacgccggtgaaggccgcgacacaggggccgagcgccatcgccaggcccatccactcagggtcgaggtccaggccgcgggacagatagaacggcccgaccacaaaggtggccatgatcacggcggcgaccaaggcactcatggccaggccggcgcgtaacgttggcgccttcaggaaggaccaggaacctcggcctatggacgatggcgcgcaggggcgatcaaccggcaaatactggtaggcgattgcggcggccaccgatcccagtggtatgccgacgaggaagatagcgcgccagccccacacactgagcaacaggccccccatgcttggccccatggcggtacccacggctgacattgtgccgagcaagcccatgacccggccggtacgctccttggtcaccgtatcgccaaccatgcccagggccatggccatcatgaccgccgcgcccaggccttgcaggatgcgcgcggcaatcagccattcaagtgccagcgccatgccgcaaagtccacaggccacggtgaacagtaccaacccggcgagcaacaatcgccggcgccccaggcgatcacccaggcgcccggcactcacaatcaccgcggtgattgccagcaagtaggccaacaccacccactgcacggcgtgaaacgaggcatcaaacgcgtgcgccaggctgggcaagccgacgttggcgatgctggtgccgagggaggccagcaacatggacagggacaggctgacaaggctgccacgggaagacgtgcgcatgggtaattccttgaatgaacgcaactgtcacaaatctacggcgtggcctaacatggcggaagacgcatgagttgcagttaatacctgcatgcaacgcctgataaggagcgccgatgcccgatctcaacctgttgatcaccctggatgcattgctcgccgaaggcagcgttgcggcggcggccaaacgcctgcggctgagcgcatcggccatgagtcgcgccctggcgcgtctgcgcgagaccaccggcgacccattgctggtgcgcgccgggcggggcctggtgccgacgccaagggcggtggaactgcgtgaacaggtcagtcgcctggtgcaggaagcccacgccgcgctacgccccgtgcaatcgttggacatggcccaggtcgagcgcacctttaccctgcgcaccagcgaagagttcgtcgagaatgtcggcccggccctgttggcgcgcatcgccggggaggcgcccggcgtgcgcctgcggttcatcaacaagaccgacaaggacagtgcaatgctgcgcgaaggccgtgtcgacctggaaaccggcgtggtcgaccccagcgccagcccggaactgctgacccaggcattattccgcgaccgtctggtgggcgtggtgcgcagtggccatgccctcagccagggcacggtcagcgccgagcgttacgctgcgggccaacacgtctacgtgtcccggcgcgggcaggaccgtggccagattgacgatgcgctggaagccgtgggccttacgcggcagatcagcaccatcgtcgccggtttcgccaccgccatcgccctggcccgcgacaccgacctgatcgccagcgtgccagagcgctacaccacccatcaacgtgcaggcctctacagctttgcgctgccgctgacgctgccgggctttaccgtggcgatgctctggcacccccggctggatgccgacctggcgcatcgctggttgcgtgggtgtttgcgtgaggtatgcgccgaacaggtacaatccgcgctgccttgacgctgaaccccaggaatttgcatgtacagccttacccgctacaccacaccatgccccgagccgatcaacagccagatcctgcaactggtggtggataacctcaccgacatcagcagcgtagcgctgccgccgagcaacctgctgtacaacatctaccaatacgccacgggctttgaagtgcacctctacctggaagcgctcaacggtgccaaaggcattgcggtcgagttggtggtggcgatggacggcgaaaagctgatgggcttttgcctgtacctgcccgtgaaggatgatcccgaggcctgcggtgtggcgttcatggcggtgcaagtcggctatcgccgccagggtgtggcccgcgcaatgatgcgtgacgtgctgagccggtatccccatgcggaactggcgtgctcagtggagaaggtgcccgcatttgagggcatgggctttcaagtgcgtggtgcacggggcacccaggtgttgatgaacacccggcactacggcaccgacggcctgatgggcgtgctggatgtggcagcgatctacagctcgctggaggtacggcagattcatacgtacctgctgcaaaagcatggcaagcgcgccatggtggacgcggagaaacagcgtgatcggcacctcgatcaactggcgcgcaaggtgcggttgtttgttgacgggcgttgagtgaaccttttttgtggcgagcgggcttgctgtggcaagcctgctgactacaacccgccctcgcttatggctttttcaggctccagttgccgccgccgtgccggttattccttcgacacgcccacgattgaccatcgccaggatggtcgccaacaactcctgctgcgcctcttcacggctgatctcaccactggccgccgcttgggacaacgcctccgcagcccccagcattgcccttagacccgcctgggaaatccgtccgaacggcgacagcgcatcgcggcatttatcgagaaagatcgcctcgtactggcgcttgagcgtctcaagctccggcgagctgctgagcgcggcaatcacccccggaatttcccgaccctgcaacagcacgcagtccacataggacgcggcgatcacccaggcacgatcctcaagcgtggcgctgctggcctcgatggcgtcgacaaacacctggttctggcgcgcatcgaaatcctcgtacagcgcggtcaacaacccggcgcgagtgacgaaatggtcgtagaccaccggcttggtcacgcccgccaactccgccaggcggccgagagtcagggcgtcggtgccttcatcgcgcaccagttgccaggcgacttcaagtaattggcgcaggcgatcttcacgggacaggcgacggcgtggggcaggggatgcagggcttgacatgcttatataccaaaagtaacttactaatcgtaacttaagcccagcctaaccctaaacgggagtttttgtcatgcatgcgttgattgttgttgcccatcacgacccgcaatccctcacccacagcgttgccgcgcaggtggccgccggcctcggcgcatccggccacacgttcgagatcgccgaccttgccgccgaaggtttcgacccacgctacaacgccgctgaccatgcggtccaccgcaaccgcgccacgcctccggccgacgtgctggccgaacaggcgcgcctcgatcgcgccgacgccctggtgctggcgttcccgatttattggtggtcgctgccgggcttgctcaagggctggatcgaccgcgtgttcgtcaatggctgggccattgagtacggccccgatacacctgtggtgaaaaaattgcgacacctgaaagtgcacctgctggccctgggcgcagcggatgacgatgcctttgatcggcatggctatgccaaggcgatgcgcacgcagatcgactacgggatttttgattactgtggcgcgcaggtggtgacgtcagaattgttgctggagtcggaaagcggcggggcgcaggcgcacctcgacaaggccagggctgttgggcggggactgttcgaaaccgaggcggttgccggttgattcaaccttcgcgaaacaggtcgtgggcgtccagcaggcggtaggcgatttccgggcgtttttccaggcctctgcggattgctgccgggatcgattggcgggtcttgcgacacatccccggcaaatcgtcgatgacgatctgaatcccgcgcatgctcttgacctcggtatggccaggtgcgatatgcacgcggatgcccagttgctggtacatcagctgttgcatgcgctccaggtcctgcaggctcttgaggtcttcaagacggtcgagcagcttcttctcttcctggcgcgtgagctggaggatgcgctggtcggcgcccggcgtctccagcagctgttcgcggtcgcagacgcaggcgccgggtgggcagggttggcgaatgatcatgtgcagagcctccccattccgacgctgacgctttaatagctcagttggaccccaagactgcccagcgccttccagtactcaggataggtcttggccacgcagtccgggtcctggatgcggatacccgaaaccttcagcccggccagggcaaagcacatggcaatgcggtggtcggcgtgggtgtcgatcagcgcggtgcacgaggtgccggccagcgcaggatcactggctaccaacaggtcatcgccttcgatggtcgccaagcccgggcggatttcgttgaggccgtcatgcagtgcctgcacacggtcgcactccttgacccgcaggttggccagctcggtgaaacgcaccggcgtgttattgaacgccgcgagcactgcgagggtcgggatcgcgtcctgcatctgcgagccgaccactgtggcctgcatgttcggaaactgtgcgatcacggcctgggccttggcgtccggctgggtgaagtcctgcgccgccacgccgatgtcgatgcggcctccagtcaacacttgcgcggcccacaggtaagtggcggcggaggcgtccggttcgatcagatagtcgtgggcggtgtagccggtcggggccacgcgccaggtggtgtcgtcgaccgcttcaacctgggcaccgaaggcgcgcatgcagtccagggtcaggtcgacatagccacgggcaccgatgtccttgccggtcagcgccacttcaatcggcgcttcgccgcaggccgcaagcatcagcagggccgacacgtactggctggacaggccgccgtcgatctcgaagcgcttagccttgatcttgcccacgccgtgcacggtgaccggcgggcaaccggtcgggctgtcgaccaggatgccgttctggccgagggtcgccagcaacgggccgatcgggcgtttttgcatgtagtcgtcgccggtcaacaccacggtgccttcgaccgtggccacggcagcggtgagaaaacgcatggcggtaccggcgttgccgaggaacagcggttgtaccggcaggtgcagtttgccgtggccggtgacgacgaaggtggtgtcgtccggctcatcgatggtcacgcccatttggcgcagggctaccgacatatggcgcgtgtcgtcactcttcagcgcgccgctgagacggctggtgcccttggccagggccgccagcaacagggcacggttggtaatggatttggagccggggggcgcgaccttgccattgagggggaagttgggcggtgtaacggtcacggttttctgcgaactcaaggtacagggctcctgatcaaggcaaggtcggcgggcggacccgaataatcggccaaagcggcggtgcttgtcgagcgcgcggtcgcagacgctgaaatttactgggcggtgtacatcaattccaattgtaggagctggcttgccggcgatggcggccttacggtgtacatatccgtctctttggtaacggcggctattggttccgctcttacagcggctcacttttgatagagcgcaaaagtaagcaaaacgctcctgccccaacactcggcacctcgcctaggctcggtgtgcccgtaattcgacagtgatttggggggccgccaccacgcgccatccatggcgcggggcggctaaaccggcatccctgccggtttaccccccaaatccctgccgaattccggccagcgtgtttgacggggcgcctaagatcaaaatcaaaagccagagcacagcggcctgagagccggcttgagtggtgtaaagcaaaggcgaatgcaaacgcggaccctgtaggagccggcttgccggcgatgcaggcgcttcggtccttcagatacacctatcgctgtgccaaccaataatcatgcagcgcccgcgcagccggttcgatttcactgacgcgctgctggtgcgcctgtacatccaggtcggccggcagttcgaaattgtcctgctcggcgcaccaggaaatcttctccaactgcgcagcctgtgcggctggcagttccggccagttaccgatggcggcgccacggatgtagccaaagcaccattcttcggcgagggtcacggtgtggccctggtgttcggtttcgtcgaagcgcgccttgaagcctgtggcgtcggtggccagttgcccggccagggtgttgatatggcgtacgcacagttcgaggaagcgttgcgcttcgtccatgttgtcccattccgggttctggccgccccagattgccgggaaccactccgccacgtccacctgcaccgggctggacaccagcgcggtgaagtagccgtcgagttcggccaggttcagcaccgaatggtcgtcgccgtatttaagcaaagtgtcttcgatgaactcgaattcagcggcggtgaggggttgggcgtgcatgggcatatcctttaaacgtcgagcgccgcgaatggggcggcttaaagcgcgaaggatggcgcttgggcccagccctttcaaggtctttaggtagaacaggcgataagtaccctgtggcgagcgggcttgtcccgcgttgggcggcgaagcagccctgaaacccgcagccgaagagtacctgacgcaccgcattcttccttccagggtcgcttcgcaacccaacgcgggacaagcccgctcgccacaattgccgtgttcacccttaatgggagggcgtcagtcagatatggccggcttttttccagcagtttccatgcgttggcacagcttgctcacgcacaccgcgccgaccaccgcgaggatgatcggcaccaggaagtcatggtctatgcgggtgaattccgccaccagcacaatcgcggtcagtggcatgctcatgctggcggcgaggaacgccgccgcgccgatgattgcaaacgcaccgaggggcacgccgggccacaccaggctccaggtgccgccgaggatgatcgccagtaacgcgccattcgccaggccgggggtgagcaggccgccttcggccccggcgcgcaggctgctgctggtgatcagcactttgaccaccagcaacagtgcggccaggccgatggtcagttcattgtcgaaacccaattgcgcggggcctttgccattgccgaggatttgcggcagcagcatcgccaggccgccgataacgctgaagttgatcagcgccagtaccggcaggcgccagcctctggcggcgtttgcccttgctgcgccggtcagccgggtgaaggcataggccgccacgccgaataccggcccacacaccacggcccaggcgatcagcaccgggctcagcacaaaatgcggcaccacgtactgcgcctctgcccccagcccgatccacgccaccgctgcaccaatcgccgaggtcgccagcgcaatcagcgccgccggccaactgaatgcgcccaccagcacttccagtacaaacaccgcgccgcccaacggcacgttgtacacagccgccagcccggcacccgcgccgcaggccacgatcagtcggtgcatgggcggttcgagtcgggcgcgttgggacagccaggtggcggccagtgcaccaacctcacggggcgccacttcacgccccagcggcgagccgagagccacggtgatgatctgcaaaagcgcgtgggcgagggtggttttgggcggcatgattggcatctgttccgacaccgcctgcttgatgctcaccagcgggcgcccgtagcgatagagcgtccaccagcccaacccggcgaccaggccgcacactaccaacacctgcaaacggcgctccggcgcggcggcggtcacgccccacaaaaaggtttcatggctgaccaggctgtcgaggctgtaaccgtacgccaggtgctgaataccgtgcagcagcagggccaggagcatgccgcccaggcctgcgccaataccggtcaacaccaccaccagggcaagaatcagcgacgaacgcaacgtggacggcatagacggctccaggcaagggccctgattgtatagccgataagccgggcctccgggatgaaatgtatcggggctgcatgaaccttgcgcccacaacattccattacgtttgcccgtcccgtttttggccgatgtgccgtcacacacacttgttatagttcgggccttatcactcgccagtcagggatcactgccatgtccgaataccaagctttcgtcgtcgaactcaccggcaacgttgcccatgtgcagatcaaccgcccggaaaagatcaacgcgatgaacgccgcgttctggaccgaaatcatcgacatcttccagtgggtcgaagacaccgacgccgtgcgcgccgtggtaatcagcggcgccggcaagcatttctcctctggcatcgacctgatgatgctggcctcggtcgccaatgactttggcaaggatgtcggtcgcaacgcccgcctgctgcggcgcaagattctcgaactgcaagcctcgttcaacgccgtcgacaactgccgcaagccggtgctggcggcgatccagggttactgcatcggcggcgccatcgacctgatcagcgcctgcgacatgcgctacgccgccgaaggcgcgcaattctcgatcaaggaaatcgatatcggcatggccgccgacgtcggcaccctgcagcgcctgccgcgcatcatcggcgacggcatgctgcgcgagctggcctacaccggtcgccagttcggcgccgaggaagcgcgcagtatcggcctggtcaatcgcgtctatgccgatcaggacagcctgctggccggcgtcatggagattgcccatgaaatcgccgccaaatcgccgattgcgctcaccggcaccaaggccatgatcagctacatgcgtgaccacacggtcaatgacggcttggaatacgttgccacctggaactcggctatgttgcaatccaacgacctgcgcgtggccatcgcggcccatatgagcaagcagaaacccgaattcgtggattgactgacatgaccccaggctggattaccacaacgctgctggacaacgacacccctggcggctgggccgtcgcccgcagccgcgacggctttttgcatgacaccaacggcccgttgtttccccgggaatggctcaagcgccaggacctgtcggtgtttgccgaacacggtatcggccacctcgatggcgagccggtgtacctgctggaactcgatgcggcgggcgaagtgccgggctgcagttggcagggcctgcgcggcttcatgctgcaaggcgatcacaccctttacaaagtgctgggctatgcggcgcagatcggcacctgggcacgtgagcaccggttctgtggcagttgcggccaggccatggtccaggtgccacgggaacgcgcgatgcactgccaggcctgtgacctgcgcagctacccacggatctcgccgagcatgatcgtgctggtgacccgtggcgacgagatcctgctggcgcgttcgccacgttttgtcagcggggtctacagcaccctggcggggtttgccgagccgggtgagtcggccgaagactgcctgatccgcgaggtccgcgaagaggtgcaggtggaggtcaagaacatccagtacatgggcagccagtgctggccgttcccgcattcgatgatgctgggctttcatgccgagtacgccggtggcgacatcgtgccccaggccgatgagatcgaggacgcgcagtggttcaacatccacgacctgccgccgttgccggcgtcacgttcgattgcgcgttacctgatcgacctctacctggcccgccgtctaggccacgctgaaccagtgctgccaggctaggcgcacggtcaggccgaggaccacggtgatgaacaccgggcgaatgaatttggcgccaccgctgattgcgctgcgggcgccaaagaacgcgccgcacatcaccgaaacgcccatggccaggccaacgatccagtccaccgaaccattgatgatgaacaccgtcagcgccgccgcgttgctgacgaagttcatgctgcgcgccacgccgctggctttgaccaggtcgatggggtgcagcagcatcgtgctcaccgtccagaacgctccggtgcccggaccggcaacgccatcgtagaagcccaggccgaagccctgggtggcctgccatttcttcttgatcggcgcgtcggcatccagcggcgccttgggtgtgccgccgaacagcaggtacacgccacaggcgaacacaatcaccggcagcatcttgttcagggtctcggccggcaggtagtgagcgacgacggcgccggtcagtgcgccgatcagcgtgccgacgatggcgtgcacccattggcgcgggtggaacagtttgcggcgatagaaggtaaaactcgcggtggccgagccgaaggtggaactgagcttgttggtacccagtaccaaatgcggtggcatgccggcggtgagcagggcgggggtggtcagcagaccgccgccaccggcgatggcgtcgatgaaaccggcaatgaaggcaaccaccgccaggatggcgagagtggtgaggtctacgctgagttcgaagggcatgggcagggcttattcttggcgggcgctatgcgaaaggccgccatcttactcgcggggactcagcaaatccaaatgtgggagggggcttgcccccgattgcggtgttccagctaactcatctgtagctgattcaccgctatcgggggcaagccccctcccacattgttactgcgtcgacttacgatcgatgtgtgtcgatccactccagcgccgtacgccagatacaaattccgaggaaatacgccgacatcaccgaccacaacccaaacgtccacgggttggtgttcgggtaatccaccaccatcaggaagctgcacagcaaccagatcgtggtcaccgcgatattgatcggcatgaaccgcttcacccggaacggatgcaggaacttcatcggtgtcacggtcagcagggccaggccgatcacggtgagcaaggtgacccaggcttccggctggatgatatacacgcacagcgccaccacgttccaggcggcggggaagccgacgaagtagttgtccttgctcttcatgttcacgttgcagaagcagaacagcgacgacaccaggatcaccgacactgtaaacaggtgggtgaagtccggcaggtcgatatagcggtagataaacagcgcgggaatgaacacataggtgaggtaatcgatcaccaggtccagcaccgagccgtcaaagcttggcaataccgtgctgacattcacccggcgcgccagtgaaccatcgaccccgtccaccaccaatgccaggcccagccacagcaggcaggccttcggcgagttttccagcagcgccagggtggccaggaaggccaataccacgccggtggcggtaaagccgtgggcgccccaggctttgagtctggctacatgcagggtcgatatcacgggcggttctccaaaaggtgaaacggggcagccgacaacgtgacgccgtcgagtctggccggggaatgcaggtatcgaccgggaagggggtaagaaggttcaccgccccggcgtatcacttagcgtagcaagcgtaagacgtttcggcatcagccctggcggaacaccagggccttcaagccactttgcgggtcgatgtcgggaaactccggtgggtttgccaggcgttcaacgaagtgcaggcccggtgcttcgcgggtgacgccgtcgatcaggaaatcttcgccgaaggccgggtcgttcatgcacgccagcaccgtgccctgcggcgtgagcaaatccggcaggcggcgcagcacgcgttggtagtccttggtcagcaggaagctgcctttctggaacgagggcgggtcgatgatcaccaggtcgtaggggccgctgttggtcactttggcccaggacttgaacaggtcatggcccaggaaactcaccttgctcaggtcatgaccgttgagacgatggttgtcgcggccacggctcaaggcgccgcgggccatgtccaggttcaccacatgctcggcgccgccttcgatggccgccacggaaaacccgcaggtgtaggcaaacaggttgagcacacgcatgcccctggcctgttcgcgcacccaattacggccgtagcgcatgtcgagaaacagcccgctattctgtttcttgcccaagtcgatcaggtagcgcaagccgccttcgacgatgatttgctcttcgacgggctcgcccgccagccattcggtggtgctttgcggcaggtagcggtgttgcagggcaacggtataacggccgaactggctgtgcagcagctgtttcaaggcgtccagttgcgcagcgtcgggctccttgaacaacgacaccagcagcacgccttgcagccagtccaccgtcagttgctccaggcccggccagcagcgaccacggccatggaacaggcggcgggtttcgctcggtggcgtttgcagggcggcgagcaaatgagcgtgcagggtggcgagtgcgtctgggttcatcgttaaacgtcagtcattgagcgggcggcattttaaacacagttgcagggtcgtgggtggcttgagcacaacgtgctgcgaaaaagccatggcgcagtgattcatgctcaaaatgctgaaaacagcgcctgataacaggcaaaacatcctccggcgccgacataaactggaaaaaaagcccggaggtgcccatgaacggtttcacgaaagcgctgattgaccagcaagagctggatgaatggcgcgacgccctggcctcactagtggccaacgccggcgccgcacgggcacggcaaattctcgacctgctggcccaggatgccagtgccccgcacatcgactggaaaccgcgccatggcacgccctacatcaatagcatcagcgtcgagcagcagccggcgttccctggcgatctcgctaccgaagaacgcctggcttcactggtgcgctggaacgccctggccatggtggtgcgcgccaaccaggcctatggcgaactcggcgggcatatcgcgagttacgccagcgcggcagacttgttcgaggtgggtttcaaccatttcttccgtgcccgcagcgacggctttggcggtgacctggtgttctaccagccgcattccgcgcccggcatttatgcacgggcattccttgaaggccgcttgagtgaagccgacctggcccactatcgccaggagatcggcgggcccaagggtggcgcacgtggcctgtccagctatccccacccctggctgatgccggacttctggcagttccccaccggttccatggggatcggccccatcagttcgattttccaggcgcgcttcatgcgttacttgcaacatcgcggcttgcaggacaccaccgaccgccatgtctggggcgtgtttggcgacggcgagatggacgagccggaaagcatgtccgccctgaccctggccgcccgcgaaggcctggacaacctcacgtgggtggtcaattgtaacctgcaacgcctcgacggcccggtgcgcggcaacgggcgcatcatcgatgaactggaggccttgtttgccggcgccggctggaacgtgatcaaactggtctggggctcggactgggatgcgttgctggccaaggatgccgatggttcgttggtcaacattttgtccaatacggttgacggccaattccagaccttcgccgccaaggacggcgcctacaaccgcgagcacttcttcggccagagtgactccctggcccggctggtcgagggcctgagcgatgaacagatcgaccgtctcaagcgtggcggccatgacatggtcaagattcacgcggcctaccacgcggcgcggcgggtcaagggcaagcccacggtgatcctggcccagaccaaaaagggcttcggcatgggtgaggccgggcagggcaagatgaccacgcaccagcagaagaagctggatcgcgatgcgttgatcgccttccgcaaccgcttccaattgccgctgagcgatgaacagaccgaatccctgagctttttcaaaccggcagacgacagcgttgagctgcgctacctgcaccagcggcgcaccgcattgggcggttacgtgcccagtcgacgccaggtcgccgggcccgttaccgtgccggcagtagcgggctacgccggtttcgccacggccgccgacggcaaggaaatgtccaccaccatggcctttgtgcgcatgctcaccaacctgctcaaggacaaagccctgggcccacgcattgtgcccattgtcgcggacgaagcgcgcaccttcggcatggctaacctgttcaagcagatcggcatttattccagcgtgggccagcgctacgagccggaagacatcggctcgatcctcagctaccgcgaagccaccgatgggcagattctggaggagggcatcagcgaagccagcgccatcagctcctgggttgcggcggccaccagttattcagtccacggcctgcgcatgttgccgttctacatctattactcgatgtttggcttccagcgcgtcggcgacctgatctgggccgctgccgaccagcgtgcccgtggcttcctgctcggcgccacggccgggcgcaccaccctcggtggcgaaggcttgcagcaccaggacggcagcagccacctcaccgctgccaccgtgcccaactgccgtgcctacgacccggcgtttgccggtgaattcgcggtgatcctcgaccacggcatgcgccagatgctggagcacgatgtggacgagttctactacgtgaccctgatgaacgaaaactacccgcagccgagcctgccggaaggcgtggaggcggcgatcatcaagggcatgtattgcttgcaaggtacggccgacgccaaggtacgcctgttgggttccggcacgctggtgcgcgaggcgcaagcggcggcgcagttgctggcggaggattggcaggtggcgagcgaggtgttcagcgtgaccagtttcagcgaactggcgcgggaagcgcgggagctggaacgctggaatcgcttgcatccgcagcagacggcacgtgtcagccacttggctgaatgcttgcccaagggggcgccggtggtggccgtgtccgactacgtgcgggccgtgccgcagatgatcggttcgtatctggattccagctacaccgtgcttggtactgatgggttcgggcgcagtgatacgcgggcggcgttgcgcgatttctttgaggtggatcggtatcacatcgtgctggcggcactgacggcgttggatgcgcggatgtgtcagctggcgattgagaagtacggcttacagacggagcgtgcggcgtcctggaactcctgacaggcgcaaatcaaaatgtgcgggctggtttttagagggtcgctatcagggccggcccaaacgcttccttgaggaaacctggggcgatatagcgctcgtagtgcgcttcggacagcaggaaaaactcgcggtcgatggcatcccgcaggtcggccagcgggcgctcacgaaactccggcagcaacaccaacccatacgcctccagcctggaaatcacccgcgcgccacgggcaatcagctggtacgcccagcaatatggcgattggtgcggcataaagcggatcttgcgattttccagttgctggcgcagcaggtgcgcgtcgaacacttccagcttgctggccatcacctgcaccagcagttgctccaggcgcaaccacaccgcctgtttttcttcggcgttgtagccgttccactggatcacttcgtggtgatagcgcttgcagccccggcagaccaggtctccgtagacggtggagcacaggccgacgcaaggggtcttgatggtttgattgggcataagaggcaatttgcaaagatttatcgcgcaccgcaacccatgtgggagggggcttgcccccgattgcggtgcatcagtcactgaagcttgagctgaacgaatgtcatcgggggcaagccccctcccacatgtggagtcaatcccagctcagcgcgccgccagtctggtactcgatcacacgggtctcgaagaagtttttctctttcttcaagtccatgatttcgctcatccacgggaacgggttggtggtacctg

SEQ ID NO: 83 - DNA, 714950 bp, Pseudomonas nodulensis
  misc_feature (47746)..(47776): n is a, c, g, or t
  misc_feature (290407)..(290446): n is a, c, g, or t
  misc_feature (451955)..(452030): n is a, c, g, or t
  misc_feature (456123)..(456189): n is a, c, g, or t
  misc_feature (471930)..(471930): n is a, c, g, or t
ccgcaatagaagaagatgccttccagcacgcagtagtaggcgaccaggttgcgcagcagttctttgtcggtctcgacggtgccggtttcgaacttcggatcggagatcgagcgggtgtatttgaggccccaagcggcttttttggccaccgatggaatctcgtggtacatgttgaagatctcgccttcatccatggccagcgattcgatgcagtactggtaggcgtgggtgtggatcgcttcttcgaaggcctgacgcaggatgtactggcggcactccgggttggtgatcaggcggtacacggccagcaccaggttgttggcaaccagggagtcggcggtggagaagaagcccaggttgcgcatgacgatgcgacgctcgtcgtcggtcaggccttcggggtttttccacagggcgatgtcggcggtcatgttgacctcttgcggcatccagtggttggcgcagccgtcgaggtacttctgccaggcccaatcgtacttgaagggtacgagttggttgaggtcggcgcggcagttgatcatgcgtttttcgtcaacggcgacacgggcggaggcgccttcgagttcggcgaggccttcggcgacgtcgagtttgtcgagggctgccttggcgcggacgatggcggcggagtcgttggcggtcacgttacgggcttccagcgcagcagcggcgccggcaccgtcgaggcggtccatgttggcttcgctggcgtggccggcgttggcgcccttgatcaccgctgcaccggtgtcttcgttgtcgacttcatcccaactcagcatggaaatgctccttcctggtattcgaaaaataagtgtttttgcaggcttcaaggcattgaaatactgcgcatagtgtggtcgataaataccgatactgcacactatgtagtggtctgttctgtttgtgggcacactatatggtgtgtaacaagactggtcaacgtgcaggaatcacgcaggcctgctttaaaggctgatcttgatctgcgcgcacaacccaccttccggccggttgctcaacgtcaacgaacccccgatggccaccaccagttgctgggcaatcgccagccccaggccggtgccgccggtgccgcggttgcgtgagctttccacgcggtagaacggctgcatcacctgcaccagttcgtcctcggcaatgcccgggccgttgtcgagcaccttgatcgacagtgcaccatcggccgtcgaaccgacctccagttgcgcggcgccggcgaacttgagggcgttgtccaccaggttcaccagcacccggcgcagggcgtgggggcgcgtgtcgagtacgaccgcgcttttgccgctgaggctcacctgtttgtgcatgtcctggtagtcgaacaccaggctgtcaaggaaggcgtcgaggttgatgcggtggctggcttcggtggcgccgtggacgctgcgtgcgtaggccacgccctcgcgcacaaggtgctccatctcgccaaggtcgctccagagtttgtcgcgttcggcacaatcctgcatgaattcggcgcgcagtttcatgcgcgtgatcggggtttgcaggtcatgggaaatcgccgcgaggatctgcatgcgctccttgaggtattcggcgatgcgctgttgcatggcgttgaacgcaaccgcagcgtgggccacttcggtggggcctttttcgtccagcggcgtggggtgggcgttggggtcgagggtttccacggcgcgcgccaggcgggtcagcgggcggatggccaggcgcacggcgaaccaggtgcagcccagcagcagcgccagttgcagcaccagcaccaccggcagccagtacgcgacgggcagggcggcgggacgtacgtcgagggtgatcgggctgccatcggccagggtcaggtgtgcctggaagtgcttctgcatcccggggatgtcgcggaaggtcagcgcgtagtgttcacccaatgcatcggcaatcgaggtggcggccatgggcacgtcgtcgctgcgcatcggctcgccggtttcgccggcgttgagcaggtagcgatagttttgccggtcgagacgcggcagccaactggcgcgctcgttggcgggcagccggtcaaggatcgccaccgaggtggccacgtcgttttccaggttgcccagcatgacggtgcgcgcgctgatatagcgctcatagaactgcgcactgaaggacaagccatgggcgcacaccaggctgatcaggaagatcagcgacaactgcgacgccagggtacgcggccagccaaaccttaaggtcattgatcggccccgaggatttccaccggcagggagaacacgtagccctcgctgcgcacggtcttgatgtaggccggttcgcgggcgtcgtccagcaggcgttggcgcaggcggctcaccagcaggtcgatggaacggtcgaacagatcggcgtcgcggccctgggtcaggttgagcaactggtcgcggttgagcacgcgttgggggtgatcgaggaacacccgcagcaggcggtattcggcgccgctcagggcgaccagggtgtcgtctgcgtcgagcaggtggcgggcggtggtgtccaggcgccagcggccgaagcggatcagccgcccggtctcgctgactaccaggttcggcggcagcattcgtgtgcggcgcagcaccgcgttgatgcgcgccagcagctcacgagcggcgaacggcttgaccaggtaatcgtccgcgcccatttccaagccgatgatgcggtcggtttcatcgttgcgtgcggtcagcatcaacaccggcgtggctttgtgcttgcccacccgcagctcgcggcacagctgcaaaccgtcgtcgccgggcatcatgatgtccagcacgatcaggtccaccggggtggtatcgaggaagctgcgcatctggcggccgtcggcgaccacggtggtgcgcatgccgttctttttcaggtagttgcccaccagttcgcggatttcccggtcgtcatcgacgatcaggatgtgatcgacatgatccatgctgcctccctcgttaaatgctcgttggggcgcagtctagccattggcgacggacttgccttgtgccctttgtattgcagtgtatctggcgataaggagatacatgacgaggcaaaaataccggcgtgaacgcctacagggtgcgcgaagcccccggcaacagggcttcaaacacttgctgcacctggggatcatcgctgtgggccacgttgaaacgcatggcgtcacggtgcgtcgcgtcatagccaaacagtgtgcttggcgccagcaccatgccctgtttcaaaccttcctgggccagtcgttcgccgttcacgccgggcggaaggagcgcccagataaacatcccgccttcgtagcccatcggcagttcgcagccgcaacgccgcagccattgttcgacccgtccaccggcctccatcaagcgctgcaccatgcgtttgcggtgcctggcgtaactgccttcgctgagcatgtggtacaggagctgctcgaacagctccgaggtcacgccgccactcatcagcttcatattggtcaggttggccgccagttgcggtgccgccaccacgaagctgacgcgggcgttggcgctcaggctcttggagaagcccgacaggtaagtgacctggtccaggccggcgagggctgccaggcggggcggtgggttggggtgcaggtcgccgtagaggtcgtcctcgacgatatggcaagcgtattgctgggtcagttgcagcaggcgaaacgcctggccggggctgaaggtatgaccggtcgggttttgcagcacgctggtggtcaggtacaggctgggacgatgttcggccagcaactgttcgagggccgcgaagtcaaaaccgtcgggacggcgctggatcgtcaccaccttgaccccgtgcagcgccaggttggcgtggaagttgaaatagcacggcgtgtccagcagcacggtgtcgccggggcgcgccagcaggcgcatcaacatgtccaggccttgcaccgtattgggggtagtgatgatctgttctaccgagaccgacaaaccttcgccgtgcagtttctgttgcagcgcctggcgcaacggcagcagcccggccggcgtacccatcccggcgatacgtaacgaaggcgcacgcaccacgctgcgcatggcttggcggatcgcttcgctgtccagccaggcctcgggcaagtgaccaccgccggggcgcaggtcaccgtagaccgtggcaagggggcggcgcaagacgctcaacaggtcctggggcagcaactcgacccaggcggccagggccgggcggacgcggtccgcggcgacgaaatagccgcggccctggctggaggtgagcaggttgcgcccgcgcaggcggtcgagggcttcgttgagggtgaacttgctcacgcccagggtctgggtcagttcacgcaccgagggcaacttgctgccgggtgcccattcgccgttttcgatggcctggctgaacgcctcgacgatctgttgcactttgggggtgccctctacaaaggcgatggccgatacgaacatacagcttccttatctttgccggtgattttaccggtgaagttcgggcggattaggcctcactttacctgccttgcgcaacgccgactgcctagactgcgcgctctattcctcaggtctatggccatgacaagcgtgttgaccctttcgtcgtttctgtacttcctgctgttttgcgccaccatcaccttcagccccggacccatgaccctgctgctcttgagcctgggcctgcgcgacggcctgcgccgttcgatcccggcgcagatcggcgccagtgtgtcgtacctgatttcgatcctggtctttgccgtgggcttctcggagttgatcaagggcaacctggcgatcacccagggcatccagctggtcggcgtcgcctacatcctctacctggcctacaaacagtggaccagcagcggcctggcgctggaccgtgccggtgcggtggagggcgcgcgcagcctgttcggcaagggcttgcttaccgggttttccaaccccaaggccatcatcctgttcagcgcggtgttcccgcagttcgccggcgtgggggggcacagttcggcggtggacattggcattctcgggctgacgttcctgttgctgcaattcgccagcggctgcctgtattgctacttcggccagcgcatcaagcacgtcttggaaaaccccaggcggcgtgtgctgttgcaacgcatcacggctgttttgctgttgggcgtggcgttgatgctggcgcggggctttgcccactgagcttatgagcggtagtggcgaattgccggtgcgctgatagactcctggcattcactcaggatttcccccccccccatgtcagctgcagaaggaaacggacttccgctcgcttcacggctgtacaaatcccgcaccctcgggctgacgctcggttttgtctgcgtggtgttcgggatgtatcccctggaccccgcctggtgggtgtgggcctggatggtgatcaacgcgttcatctggccgcacctggcgtttcaattgaccttgcgcaccaccaacgcactgcgcagtgaacggcgcaacctgctgttcgattccttttgcggtggcttctgggtcggcgccatgcacttcaacccgctgcccagcgtgaccacgctgtcgatgatgaccatgaacaacgtggccatcggcggtccgcgcttcatgctggcggggtggctggcgcaggcgctgggtatcggcgcggcgctgctgatcttcgcgccggcattcattgccgtgaccagccaggcgcagctctacgcctgcctgccgatcctgatgctgtacccgttggccctgggctggatctgctaccgccaggcggtgaccctggcccgccacaagcgtgaactgttggtcctgagtcgcaccgacagcttgtccggcctgctcaaccacggcgcctggaaggaccaccttgagatcgagttccagcgctgtcgccgggattcggtaggtgccgccatcgcgctgatcgacatcgaccatttcaagaccatcaatgacacctacggccatgtcaccggcgatatcgtcctgcgccagctgagcaaagtgctgcgccagaacctgcgcgccaccgaccttgccgggcgttacggtggcgacgagttctgcgtgatcctgccgggcatgccgctcaaccgcgccaccgaagtgatggacgccttgcgcgatcgcttcaacgccttggcctacgcccaggacccgaccctgcgcgccagcctgagcatcggcctggcgccgtatcaaccgacccacgcggattcgaccagttggctcaatgacgccgaccaggccttgtacgacgccaaaagcagcgggcgcaaccgtgtcagtgcggtgcaggagggttggttgcgatcggtctagtggggtagggtgtctcggcacctccaacaaaaaacaaggatcggttcatgctcttcactttccgccgtaccctcctggccgccaccctggccatgtccttcgccgtgccggcctacagcgccgagccccataaacagatccaggcccaatccgaacactacaaggccgacgccctgaaactgctggagcgcctggtcaatatcgactcgggttcaggttatgaaccgggcctgacccaagtgcgcgacatcgccgtggatgagttgaaacagctgggcttctccatcgagctggtgccggacaaggccgccaacaacagccacgtggtcgccaccctcaagggcaccggcaaagccagaatcctgctgatggcccacatggacaccgtgttcaaggaaggctcggccgccgagcgcccgttccacatcaaggacggccgcgcctatggccccggcgtgatggatgacaagggcggcatcgtcgccggcatctacgcgctcaaagtcctcaaggaccagggcttcaaggactacgcgcaaatcaccttcctgctcgacgccagcgaagaaaccggctcggacgccgcctccgagctgatccgccaaaccgccaaggcccacgacgtcaccctgaacctcgaacccgggcgcccagccgacggcctggtggtgtggcgcaaaggcagcgccaccgctgtggtcgaagtcaaaggcaaagccgcccacgccggcgtcgccccggaactcgggcgcaacgccgccatggaagcggcgcaccagatcctgcaactgggcaagttgggggatgctgagaagaaaaccaccatcaacttcaccgtgatcaagtcgggcgaccgtaccaacgtcattcccgaccaggccaccgccaaggccgacgtgcgcgcggcattgccggaagagtttgatcgcatcgagaaagacctggcacgggtatcggccaacaagttgatcccggaaacggaagtgaagaccagcttgcagcgtgggctgccaccgatgccgcagacgccggagtcggacaagttggtggcgattgcccaggggatttatggggaattgggcaggacgttgacgatcgaaggcagtggcggcgcggcggatgccagcttgtcagccggggtagggacgccgacgttggacgggtttgggattgtcggcgggaatattcacacaccggaggagtatgcggaggtggagagtgtggtgccgcggttgtatctgttgagtcggatgattatggaactgagcgagcgctgactgacgctcttttgtggcgagcaggcttgccctgcgttgggctgcacagcagccccaaaacagacaatgccggtttatcagaaaacactcatcgcctggattggggccgcttcgcggcccaacgcgagcaagctcgctcgccacataagcgggtatcgcgtcctttggcaccggttagattttttcatttttaattttggaggttctatttttaagtgttgacacgacatgcctcaaccaagttaggccgtcaggccattcgctgcgataataatagtagcaacctatatcgctgaataaataagcttccagctcttgctctgtctttccgctgcgcattaacttatctagttctgtttgtacttttaatatcgtgtcttcagatgagtcggagacgaaaaactctataacatcgtccgctttttcgtggtcgtcaacccagtcttgattgaagtaaccagcaaaaaactgttgtggttcgggatagtattggttcatgggtttgaaaatccagtatgaattcggtagccagtatgcatgttaggggctttacggattatcaggtaaatttcctttcccgaaacggctgatgtgctgttctttttgaaacttgtacctacgggatgtttggttttttgaatgatgatgatttgattgtttttcccttttaaaaagttatcgattttagctttgttttcatccagtacggtcgatatttcccgctctgctgttgctctgtcatggaaggctgaggcagccgggatgtgtggctcttgttgtggtgagcaggcttgccctgcgttgggctgcgcagcagccccaaaacagacaatgccgatttacctgataaacacccatcgcctgaatggggggccgcttcgcggcccaacgcagggcaagcctgctcgccacagaggggttgtgttgccttggagggcggtgtttggtttaccaggttgactggtcttcgaggctggctttttgaaggtcttctttccagaccttgttggcgagtcgatagatgtcgacgaagaagcctcgggggtcggctatttctgtttcggtccaagccatggttatgtacttgtcgtaatcgttctcaaattctttcgaaaagtcaaagtcggggttgtctagtgcgtctttgagagaagaaatcaatataaaacgatgcctgtaggaaaggtgcataaggtctttcaggacgaaagaaattatgattttttccctgtcttgatgattgttagggtcatgcttccatagctcttttccaaccgtttcctcaaggtcgtatatcgataaggctcctaataaatgagagacattaggagtgtatggtgtgtccatgaatggggatttcagcatggtctgctcacttcgggaaagcggtgaatggtcgagtcggattgtgtcgatcaaatctgatttctgctctgtccatgttttcaatgtatctggggttgttcaagtccccggtattaggtttatagcctcgcccggccccaggcagttcgaccacgaccactgggttgcctgcattatccaaacctgtgggagatggcgaatcgccctgcatcctgcccaaggccttgtttatagcgtggagttgcattttccaagagttaaattgggagctggagctgatatacccgctctccccagtcgttggatttgttccatcaatagatcgttgttttaacgcgctatctggtatctctgggccatgcttttcaaccgtatgcatatcgtattcctgctcccagctcagcacccttcgttttgcatttgcctctgtcagtgcatctattctcgactgtccattagttcgcggtagttgaggtagagcaggtgcgccttcatcgacgttaggcctccgaagggtaggaggaacgttaggtttacactcgtcgccagggcagctacttaagcccagcggatctacccatccggtagggttaggcacgtactggtacgcattgatcccacccgccagcttcaccggatccggcgtcaggtaacggccaacatccggattgtagtagcgatggcggttgtagtgtagcccgctttcctgatcgaaatactgaccctggaaacgcagcgggttgtcgatttttccgatgtcgatgcggctgatttcgccgtaggcacggtaatgcgtagaccagacgatttcgccatccggggcagtgagttcctgtggggtgccgaggtggtcgagttggtagtggtaggccttggtttcctttggaccgaaaccttccaataaagccagcgggcgaaagctgtccggttcgtagaggtagctgcggtgccgatccgcgtggtgttcggcgatgagtttgtcgccttgccagaagagttcggtcgtaatcccatctacggttttactgatacgccgcccaaacgggtcgtagcggtagctggcagtctggccgttgggcgttttaatgccgatcaggcggtgctgacagtcgtagcggtattcggtgacgagggcgtggcctttgccgcggcgttcgcggatgaggttgccgaaggcgtcatagtcgtaatggtggtcgccctggatcatcaggcggttgccggcgacgatgtcggggccggggcggttgtgcatgagcaggttgccggcggggtcgtggccgaagcgttcctgttcgtcttgagtgtggtcggcgcgggtaaggcggttgagtgcgtcgtagtggtagcggtgttcgcctttgcgggtatcgagcaggcgggtgaggttgccggatttgtcgtagtcgtagtggcggcggtagagcgggccttcggcgtcattgatgctctggttgaacaggcgtccctggtggtcgtgttggtagtggctgagcagttggccttgttggcgttgctgttcgcggccggccttgaacaggtgtgaggtaagaacagcgccgttcagttcgacggtggcgaggtggccgcctttgtcgtgattgaaggtgaggcggttgttgtccggcaggcgcaggttttgcaattggccgcaggcgtcgtaggcgtagcgcagcgtgccccagccttggtgttcggcggtgaggcggttttggctgtcgtactcgtaggccagggaccagtggccgtcttctacgcctaagagattgccttggcggtcgtaggcgtaatcgacggtattgccatcgggcagggtttttctgatgaggcgtccggcatggtcgcgctcgtagcgggtaaccagctgactgccgtcatcgccgtgttcggtcttttccgaaaggttgccattaaggtcgtaaacgtaagcggtgcgctggccgtcaaacccggtttcctgctggatcaggccgttgttgtggtactggagccggtaggtctcgccaacttcgttttcgatttcggtcagcagtaaccgcgcgttgtcgtagcggtagttgacctgagtgccatcggcattgatgcggcggctgatcaggtgcaggccgtcggcgtattcgtagcgggtgacgtgcccgagttcatcgcgctcggcggtgatttttccgtaagcgttgtagctgtattcccgatgcgcgccgcctggcagcacaacgcgaatcaaccgacccacgctgtcccactgatactgggtcagcgcgccatgttcatcttcccgcgcaatctgtcgccccagatcgtcatagcgataacgcttgatcccaccattgggcaactgctcctcaagcaactgcccacgctcattccacaccagccgatgacagctgtggtccgggtaccaaaccccaaccagttgcccgtatttgttgtagctgtagtcagtagtgttgccatcagaatcggtcttgcgcgttacatcgccttggtcgttgcgctcatacttccaaaccgcctgaccccgccttacaacgcgtacgaacccgttgtcatgctcgtaggtcgtcggctcatcgtcccccggaaacaccgccaccaagcgcccagcttcgtcgtactgatacgccgtgatcgccccgagcgggtcctgctcaaccgtcagccggcctttttcatcgtaggatttgaaatgctcggccccgtcaggatcaacccgctgcaccagccgcgcccgttgatcgtgaagatagacttcctggctgccatcggcgttaaacaccgtgacctggccgttgtcatcccaggcatagcgcgtgtccatctgcgagaagctggcccaatgccgcacacaccgcgccgccttgccagaccgttcccactcccaatagaaactcgccccaccggccaagtcgcgttcaagaatgacgtgctgttcgtcgtaccgataaacctcgctttcgccgatggcattggtcgcgcaaatcagtcgtccagcttcgtcgtaggtgtaggaaacaacggtctgttccgtcacccactcaaacggctcgagacctttagcccgatgaacctgatagtccaccgccacgatgcggcccgacgcatagcgcaaccaaagcgaacgcccgacaccgttatccacccgctcaacacgccccagaaaatcccgagtgatacgcagccggttgtcatacgcatcgctgatcgccgtcagcacaccgtcgcggaagtggtagaaacgtgacgcctgcgccagcaccagttcatcgggcgcagcacccaaatagatcgccgcttcggccaggctattggtgatcgcaggtcgagaggcagtaggcaagggcagggtggtcgaccgattctcatgatcggtccacaccatcgaatcaccctcaaccaccagccgatgcgccagcgagtgactccagccaaaccccagcccgcaatccattttcaccgcactggtgcggtacaaccgggtccactcaaacggcaagatcccgtccagcgtcccatcggtaagggtcagcaattcctcgccggtgaccatcgacaccgggcagccgttagtggcggtcttgtccgcaggcgccgccgcatccccattcgggtttcgagcagaagccggcacatcatccacaggctcctgccgcaccagcaccgtccgctgcgtggccttatcccgaaccaccggcaccgcgttggcaaccacctgatccccagccttcaacggcacatccggaaccaccctgatcggcgtcgcacgactccccagcagcaacggcctggccgcctcgacatgcgcgtccaaccgaggcccgaccaactgttccgcgagcatctccagccactggcgagcccggccagacttgatgtgactcgtcacctgagcacccaggcgcagggtcacccccatggcgcccgcgaccctcaccaacagcagacctatcaacacgtcgccggtgatttcccccatcacctcgctcatcgcttgcggcggcaacatccgtatccaactgcagatcgccgacaggtagataaacatcaacggctcatcgctgagcacgagcaggccctgggcgatggcgtctttgcccagtttcagcagttcatccagttcggcctgggagacgtactgcagcaacttctggctgttgctctggaggtccgccagcagctcggacagttgtgtgaaattgtcccaaaggctgtaaagcgccttacccattccattaagaaacgccttctccagcagcctgcgttgatcaagcgggctggcgtctgtgtagtctttccactgggcttcgaaggtgtttttccactcctcgcgcaggcgtgcgtccaatgcatcaatcaccgattgataggatgcatacagtgccttgacgtggtccttggaaacgttgggatagaagctgacccggtatggctggtcgcgctcacactcgtcgatttcgagaatgccgctcgggccgatggttttgtggatcggctcgcccagtggcccgccgttggggtcgacacgctgcaacatcaccggcgtgttgccgatgggtacgaactgcgtgctttggaacaggtgcaccagggtcaacttgccgttggcctggcaagtcgcaacggtggtgcttgggtatagagaacgattgatcggcgcgaccagcgccacttcatccccgaccttgaagacttgctcgacatccagcgccgacaggctccaaaagctcgaagcccatgcgtcaaaggtattcaggcattcccggaaatcgcgaaagacgcgctcgatatcgaccgtcttcacatccattggggtcagggccagcctgccaatggccgggttcaagaaacagctccaacaaccagaaagtccatttgcaatccctcgcactgtgtagtcaggcgagggactttgcggaccttttcaggggaggggagtagagcttatccggcggttacgtgggacgtttcgacaacgctcgtcttctctcgccccaacaccaggctgcacagtgccggcaagaacaacagcgtcagcaccgtgcccaccaacaccccaccgatcagcacgtaggccagggacgaccagaacaccgacaatgtcagcggaataaacgccagcgccgccgccagcgcggtcaggatcaccggccgtgcacgccgcacggtggcctcgacgatcgcctcgcgaatggccatgccgtggtcctggttctgacggatctggtcggtgaagatcagcgtgttgcgcatcaggatcccgccaatcccgatcaagcccaggattgcattgaacccgaacggctggttgaacagcagcaaggtcggcaccgctccgatcaaacccagtggggcggtggcgaagaccatgaacatcacaccgaacgagcgcacctggaacatgatcaccgtgagcgtcagcaggatcatgatcgggaacagcgcggccagggcgacgttggccttggcgctttcttccaccgggccgccgatgtcgatctggtagccggccggcagcttggcgatcagcggttgcaggtctttgtacacggccatttccacgtccggcggttgcacgccgtcgatgatgtcggcgcgtacttcgacggtggtcgcgcggttgcggcgctttaggatcggttcttccatcaccgcctggaaatgcccgacctgggccagcggcacggaggtgccggcgctgttggtgagggtcatgttgttgaggttgccgaggtcttcgcgttggctgccctgggcgcgggcgaccacggacacagtgcggttgccttcgcgcacctcggtgatggggttgccactgagcaacgcgttgagctgggatttgacctcgttgggggtgaagcccagcagacgcaggcggtcttggtccagcaccagacgatacccgctggtgcgctcgccccaatcgaggaaggcatccttggtcagcttgttggcggcgacgaccttgcgcacgtcttcggagatgccacgcagcacatccacattcgggccagacacacggaacaccaccgggaacggcacgggcgggccgaacagcaactgcgtgacgcgcacccgtgccgccgggaactcaccggccgcaatccgctcgcgcatgcgcagtttcaatgcatcgcgggcatgggagtccggggtctgcacgatcagcttggcaaacgccgggtccggcagttcagggttcagcgacaggaaaaagcggggcgcaccgccgcccacataagtgtcgaccatcgtggtttgcggctcttgcagcagggctttttccagctgtgcggccaccgcttcagtgcttttgaaggcactccctggcggcatgtacacctcaagaatcagctcggaacggtcggagttgggaaagaactgcttcttcaccacgcccatgcccagtacgcacagtacaaacgcggccaccaccagcccggtcaccagccaacgcccgcgcacgcaggcttccaccagcgtgcgcagtttctggtagtagcgcccggcgtagatcgcgtcatgcccgccgggcaccggcttgatctgtggcaacagtttcacgcccaggtatggcgtgaacaccaccgctaccagccaggaggaaatcagtgcaaagccgacgatccagaagatattgccggcatattccccggcaccggagcgcgcaaagcccaccggcagaaagccgatgatcgtcaccagcgtaccggtgagcatcggcgccgccgtggagctccaggcaaaggtggcggcgtggatgcggtcgaaaccttcctccagtttcaccaccatcatctcgatggcgatgatcgcgtcatccaccaacaaccccagggaaataatcagcgcgcccagggtaatgcggtcgaattcacgcccggttagcagcatgatcacaaacaccaccgacaaggtcagcggcaccgcagcggccaccaccaggccgacacgaaagcccaaggccaacaggctgatgaccatcaccacggcgagggcaacgaagaacttgagcatgaactcgttgaccgccaggctgatgtttttcgcctggtcggagactttggcgaagttgaccccgagcggcaggtcggcctggattctggcttcctgggccttgaggctcttgtccagctccaggccgttccagtgtttctccatgatcacgccgagcatcagcgccgggtcgccctggtggcggatgcggtagctgggcgggtcttcatagccgcggctgacggtggccacatcggcgatgcgcagcacgcggccgttgacttccagcggcacgttttcgatcagtgacaggctgtcgaacgcgccgtcgatacggatgtaggcgcgggcgccggcggtctcgacgaagcccgacggcgccacggcgttttgcgcggccaacgccgaaaaaatctgctccggcttgatgcccagcgtcgccaggcgttcataagaaaactccacgaacacccgttgcgcctgttcgccgaggatattgaccttcttcacccccggcaggttgaggaaaccctggcgcaattcttcggccatctgcacctgttgccgatggggcaggtgctcggcctccagcgcgtacagcgcgaagtacacatcggaatattcatcgttgaagaacggcccgctcacgcccttgggcagtttggcggcttcatcgctgagttttttacgggtctggtagaacaggtcctggatttcactgggccgcgtggattccttgtaggtcatgcgcatcgacacgaaacccggctgggcgatggtctcgacgcggtcgtagtagtccagttcctgcaggcgcttttccaggcggtcggccacttgctcctgcatttcctgggcggtggcgccgggccaggcggcagtaatggtcatcaccttgacggtgaaagacgggtcttcggcgcgcccgagcttgccaaacgaaaacaccccggcggcgaggatcgcaatgatcaggaacaacgtgaccgcacggtgcttgaccgccagttcagagaggttgataccgcgcatgctcagttgtcctgtttgcggttgagggccaatgcctgggcgggcagcaggcgtacggcgtcaccctcgtgcagcaggtgtgcacccagggcgacgacgatttggccgggcgctacgccgctgtcgagcagcgcgtcttcctggccgaggctggcgactttcaccggggcgaagctgatcgtgtcatctgcaccgatcacccacacgccagtgccttgcccggcgtcctgcaaggcgccgatgggcacgcgggtttgcgcggcctggccgttgccttgcaggcgcacggtgatggtcgagccgagggcgaaacgctcgatggtgccatgcaacacgtagcgagcgcggtaggtacgggtagtcgggtcggcgctggcggacagttcgcgcagagtggcggtcaccgcctggtcgggggcgccgaaggggaaggccagggctttctgcgaagcttggtcgcgctggttttccggcaggttgacgatggcttcacgggctccgtcgtgggccaggcgcgcaacgatctgtccttcggcgaccacctggccgcggtccacccgcacgtcggtgatgatgccgtcgccatcggccttgagcaccgagtaagtgcggcggttttcgatctggctggcgtcggattgcgccgcggccagctcggcttcggccacccgcaggttggtcgccgactggtcgaagatctgccgcgacacggcgccggtgctggccaggcgctggtagcggttttcgtcgtcacggcgttggcgcagttgggcctgggcggcggtgacgcggtttttcgccgagcgcagggccagttcgaagtcgccgatgtccagtaccagcagggtgtcgcctcgggacacgtgctggccggggtcgaccttgcgttcgatgaccttgccgccgacgcggaagcccaggtcgctttcggtacgtgccgcgaccacgccggtataggcgctttgctgggtgccggccgcttcgactttggcggccaggaccgggcgaggttgaggcacttcggcggcggtgtcggccttgctgttgcagccattgaggacgatcaacagggccaggggcgtgagaagacgcagggggagaggttgcatggcgggctccggggtaaccattgggcaaaaaattatggacataattttttacgcatattatggtcgaaatataaattaatccagccccccggatgttccccatgacaaacgccccggccccatcgcgaagcttgctgtttttactggtggccctgacggcactgggtgaggtctcgacccaattgatcattcccggcctgggtgccatcgagcaggcgctggtcgcgccggcaggttcggcactgatggcgttgtcggcatttgtcgccgctttcggccttgggcaactgttgttcggcccgctgtcggaccgtattggtcggcgcccggtgctgattggcggcctggcgctttacgtgctggcgacgttgtcgatgctgctggtccacgacatccaccagttcattgccgcccgcgtgctgcaaggcctgggcgcctgcgccgcgctggtactggcgcgcacggtggtgcgggatgtgtggaaggccgaagccgggccggccctggcgttgaccatgatcggcatgctctacgccatcgtggtggcgccgatggtcggtggcctgctgatcaaactgttcggctggcacgcaccaatcctgctggcgctggcgattggcagcgtggtgctgttgctggcgttgctgttttttcgcgagagcaaccactcgctcgatcccaaggccggtcactggcgcaccctcggcgggcaatacctggacctgctcaagggccgccagtaccgggcgttcgccgtggcgctggcgtgcacctatggcgccatgtttgcggtgatcgccggttcgtcggcggtgttcatcaacctgctgggcttcagcagcctggaatacggcctcaattttggcctgattgtgtcgatgctgatcgtggggtccacctatacccgccgcaacatcatgcgcctggggccgcagcggattgtagcgatgggcgtgacgatggtggcggttggcggggtgtcggccgtggtgatttatgaactgttcggcctgtcggtgctcggcctggatattccgattgccctggtcaccctgggtggtggcctggtgttgccgggcgcggtcaccggcggggtaatgcccaatgcgcatcgcgcgggcctggcagcggggctgatggggtttgcgcagatgttcggtgcgacttgcagcggcatcctgctcagccagctgcgtgacggcagtgccgcgccgatgatcatcatccaggctggctttgcgctgacggcctacgtggcgtttcacctgctgcgccaacgtcaggtcaagggattgtcctatacgtaggacgaacagggctgcttttgccggctagtgctcaacggcgggcagccttatggtgtatgcactttggaggtacaccatgaaaaagcttatcggcatctacaccagcccccgcgcccattgggtcggcgacggctttccggtgcgcacgctgttttcctacgacgccatgggcaagcacatcagcccattcctgttgctggaccacgccggtccggccgatttcaccccgactgagcaacgtcgcggcgtcggccagcatcctcatcgcggctttgaaaccgtgaccatcgtctacgacggcgaagtcgaacaccgcgactccaccggtgccggtggcaccatcggccccggcgacgtgcaatggatgaccgccgccaaaggcatcctccacgaagagttccactccgcagccttcgcccgccgaggcggtgcgctggagatggtgcagctgtgggtcaacctgccggccaaggacaaaatggccgaagccggctaccagacccttgtcgatggcgacatcccggtattgcccctggccaacgacgccgggcggctgcgcctgattgccggtgagtttgccggcacccgaggcccggcccgcacctttacgccgattgatgtgtgggacctgcgcctcaaccctggcaagcccgtcaccctggacctgcacgaggggcgcaacaccgcgctggtgatcctgcgcggcacagtgctggtcaatggcgaggaagtcgcgcgccaggggcaattggcgttgttcgagcgggagggcagccagctcacgctcgagtccaatgacgacgccaaggtgctgctgctcagcggtgagccgattgacgagccgatcgtcgggcatgggccgtttgtgatgaacaccgagcaggagattcatcaggcattcgccgactttcagtcgggtcgtttcgggcagatgtaagcacacccgctataccctggcgcggcatttcatgcgatcttcacggcattcgccctggagtcgcctggatgccctcatttatcgctgatcacccgatgctgtgcgccctggcgctgatcttgatcgacatcgccgtgtggcgtcttatttcagccaacctcgccaactggaagctggcggcgcggttggtgatctttgcggtgttcagcgccgtgctgttcaacgacggcatgaaccccatgcaactggcgccctatgcggacaacaccgccttgcacctggccgccacggcattgcagatcggttggtggctgttcgcggcgcgcacgctgacggtgttgctcggcacgctcatgatgcagcgggtcgggcataccggccgcctgttgcaggacctgatgggggcggtgatcttcctgatcgcgatcattgccgccatggcctacgtgctcgacctgccggtcaagggcgtgctcgccacctctggcgctgtagcaatcattgtcggcctggcgctgcaaagtaccttgagcgatgtgttctccgggatcgtcctcaacaccaccaagccttatcaaatcgatgactggatctccatcgacggcaccgaaggccgggtgacggacatcgactggcgcgccacgcgcctgcaaacctcccagggcagcctggcggtgattcccaactccctggcggccaaggccaagatcatcaacttttcgcgtccggcggacatgttcggcctagcggtcagcctgcaggtcagcccgcatgcgcggccgcaaacggtgatcgaagcgctggagcgggcgatgcaagggtgtcgaccgctgctgggcaagccggcgccaagtgtggcgttcaagacgtcggccagcggtggcgtcgagtatgaaatcagcggattcgtgccggccatggccctcaagcgcgaagtgcgcaaccagctttacgacctggccttccggcatttgcaggcggcgggcgtcggcttgctgtcggccactgaaaacagcgcgccaccggcgatgtccgcggcgcgcgcgttactggagcggtcgtcgattttttccaccctgcgccaggaagagaaagacaccttcagccagaacatgaccctgcacacctatcgcgccggcgagatgatcctgccggccggagaggtcagcgatcatttgttcatcgttgagtcgggtgtggtctcggtgatgttgaccaagggcgggcacaaattcgaagccgggcgcatggggccgggggaggtgatcggcgaggccgggatcctgtcggatgaggccacgctggcggatttctcggccaagacgttctgcaccctgtaccgcatcgagaaggaatacttgaagccgtgcctggatgcgcgccacgacatcggcgaagcgatgaaggccttgctggatttccgtgtgcacgccgcgcaggccttgacccaggaggcaccggtggtgccggtgaagaagggtttcctgcagtggctgcgccagcgcggtctgtgaactccagatcgtgcaggcacaatccgccaggcgtgttaccagccgcgcaggcgctcccacacctgtagttcgccggtctcagacaccgcggtgtaacagccgaactgcgcccctgtcgcacacgcatggttgggcagaatgcgtagacgtttgcccagtgggaattgcgcgaccacatccacgtcgcgcccctggaactgcgccacgccatgttcctgattggcgctgcccagcagcaatccatcgatgggcttgccgtgttcatcgcagacctggccataaccaaaatcacgcttctgcgcctgagtaccgcgatcccggctcatggccatccagcccgcgtcggtgatgatccagcccttttccggctgatggccgatcaccgtcgtcagcacgctcaaggccagttcatcggtgcggcatacgccgatgttgtgcatcaccagatcgaaaaacgcatacacgccagcgcgcaactcggtgacgccctccaggctcactgccgacagcgcggtgggggtggagccgacactcacctgtgcgcacggcatcccggcagcgcgaatatgctcggccgcttccacgcaccgtgcgcgttccagttcggcgatggcccgcagggcttcgggcgtgtccagcccgtagctttcgccggcatgggtcagcacgccgaccaggctgtcgccgagcagccgggcaatctccagcaagcgcgggtcctgcggcttgacaccggagcggtggccgtcgcaatcgatctcgatcatcaccgcaaaggtttcgccatgctcgcggccgaagtcgatgatggcctgggcaccggcaaggctgtcggtgatcagcgtcaacgcgcaaccccggcgacgcaaggccagggcctgaggcaatttgtgcggggccatggccacggcgtagaggatgtcgtggatgcccaggtcgaagaaatactcggcttccttcagcgttgaaacggtgatgccgcgggcgcctgctgcgatttgcgcggcgaccacttcagcgcacttatgggttttgacatgggggcgcaggtgcacgccgagggcattggcacgctgctgcatgcgctggatattgcgctgcattttcagcgtgtcgatcaatgcggcgggggtatccatggtgcgggctccacaatgaggggcagggggtaaattgacgccctgtccaggactggatatgttgtcttgcatgaaaaacacctctcccaacgatactcacttgatcagccagctcgaacagatcgccgagggcttgagcaagaccttcagccccttctgcgaagtggtgctgcacgacttgcgcgacccccggcactcgatcctggccatccacaacaacctgtccgggcgtgcgcccggcgacccgaccaccgagctgggcctggcgcggattgccgaccccgactacccgcaagtcatcgccaactaccagaaccagttcagcgacggccgccaggtcaagagcacctccatcggcatcaagggcgccggcggcgagtacgtcgcggccttgtgcatgaacgtcgacctctcgttgttccgtggcttgcaaggcatgctcgaacaattcggctcggtcagtggcgacaagctcatcgagtccctggacccttccggcgccgacgtgatccgtgcgcgtatcgaccagttcgccgcccgcctggccaccaccccgcgtgcgctgaagacagccgaccggcgtgtgctgatgcaggaactcaaggactcgggctgcctggacatccgccgggccatggaaacggtggcgtcccatctgggcgtgtcgcgtgcggcggtctacacctacgccaagtagcgcgccacggcctcgatctcgatcaggtaaccgtggtgcaactccggcaccggcaccaccgcgcgggcagggcggtgctcgcccagcgcggcggcatagaggccatcgaaggccggccaatgctcgacgccggctacgtacacggtgaccttcaccaggtcctgcgcggttccgccggcggcgttgaggatggccaataaattatccagggcaatttgcgcctgttcggcaaacggcgccatcaggttatgccgcccatccgggctcaccggcaattggccggagatgtacagcgtgtcaccgtggcggatggcttgtgagtaatggccggcaggctgggccgcatgggcggtctggatgatcttcatgaggcctcgcacaacagggcggcgtacttctcgatatcgacgttgccaccggtgacgataatgcccacgcgctggcccttgaagcgttcaccctgtttgagcaacgcggccaaccccaggcagccggtgggctcgaccaccattttcatgcgttgcataaagaacttcatggcgccgaccaactcggcatccgacacggtgaggatgtcgttgacctggtcgcggatgatcgggaaggtgcagttgcccaggtgctgggtctgggcaccgtcggcaatggtcgccggcgtgtcgatgtgcacgatgctgccgctgcggaacgagcgctggccgtcattgccggcttcgggttccacaccatacaactggcaatccggcgccagggcacgggtcgacaacgccgtgcccgagagcatgccgccgccacccaggccaacgaacaatccatccagcgggccggtgaattccagcagttcgttggcggcggtgccttgcccggcaaggatatgcgggtggtcgtagggcgggatcagcgtcaggccctgctcggtggccaggtcgcggccaatctgttcgcggtcctcggtgaagcggtcatacagcaccacactggcgccgtagccacgggtcgccgcgaccttggccgccggcgcatcgctgggcatcacgatggttgccggcatacccaataactgcgccgccagggcaatgccctgggcgtggttgccagacgagaacgccaccaccccggccttgcgctgctgtgcatcgaactgcgacagcgcattgaacgcaccccggaacttgaaggaaccggtgcgttgcaggttctcgcacttgatgaacacctgggcgccggtcagtgcgtcgagggtgcgtgaggtgagcactggggtgtgatgggcgacaccctccaggcgctgggcggcggaaatgacgtcgaggtaagtcggcaatggcatagggcggacctcattggctggtatggataaaatatctatatcaagacaaatagtaaaggttggtttgtgcatgttagcgttttgcacttctctgaccgctggaggattcaacattgatccgcctcaccgactacatcgccgacctctcccaatctccgcttgcaccgtgggctgacctcgcgccctgggcgctggccgctcaggcgcctgctgttgtgcgtcagttgctggctgaactgccgggcgacgattacataattgaggatgaaatcgcggtccaccgcactgccaccgtagaagcgggcgccttgctcaagccgcccctgatcatcggcgcccattgcttcatcgccagcggctcactgctgcgcggaggctgctggctggatgcacattgcatcatcggcccgggcgccgagttgaagacctccttcatgttcagcggcagcaagctggcgcacttcaatttcgtcggtgattcggtgctggggcacggcatcaacctggaggcggggagcatcgtcgccaactaccgtaacgagcgtgatgacaaggaggtgcgagtgcgggtcgacggtaccttgcagcgcaccggttgcgacaagtttggcgcgctgctaggcgaccagtgccgtatcggcgccaatgcggtgttggcgccgggggcggtgctcaagcctgccagcgtggtgggacgcgggcaggtgtttgatgctgaagcctccctataaacaccgcgttgaaaagatcatggtcagtcggcacgatattaaatagaatgaatctcatttgagactcactcgcgccgcgcaggtcgcttgccatgaatgatgctgttgttccgacccacgcctccgaactgaccttgtcgagcctgtaccgcgaccatcggagctggctggaaagctggctgcgccggcgcctgggcaacgcctgggatgctgccgacctgagccaggatacgttcctgcgcgtactcgccagcgcccagccgattgcgcagatgcaggagccgcgtgcttatctggtgaccgtcggcaaacgcctgctggtgaatttccatcagcggcgcagtcttgagcaggcctacttgaatgccctggcgagcctgccgcaagcctgcgtgccatcgcccgagcagcgctggctggtcctggagaccctgcaagccctggacgagttgctcgatggcttgccggtgctggtccgccgcgcctttctgtggagccagttggaaggcctgggctatcgcgacatcgccgaacggcttgaggtgtctgaacgcacggttaaacgctacatggcccaggcctacgaacactgtttgctggtggacctgtgagccgtgacgtcgctcgcgccgctgcccagtggttggcgctgctcgaatccggcgcggccaccgagcgtgaccacgccgcgttgcagcactggcgagacagccacccccagcacgagcagacctggcaaaaagcccagaccctgcgccagcgtttcagcgacttgccccaggccctggcgatggccagtctcgaccgtccgcaaccggggcggcgcgctgtgctcaagcgtgcattgggtatcgcagccttggtgccgacggcctggctggtcagccgccaattgcccctcgaggcgtggcgcgccgacctgcacaccgccaccggcgagcgcaagcgcatgtccttggccgatggcggcagcttgcagctcaacacggcgacagcggtggacatggaccttgcacagcggcgcatcacactcgtagacggtgagttggcgctgaatgtacccggggcggcggcgatgacggtgcagacccgctatggcgaattgcgggtcagccaggccgaggtgtgtgtccggcagctggccaagggttgtctggtgtcggtgctcaagggcgcggtccaggtacgcgacctgaacgggcaaatggcgacgttgccgggtggtcagcaagcctcgctgcaagccggcgggctcggcgcctgggcaccgttcgatgtgttgcaattgggttggcgcgaccgcgtgctgaccgcacagaaccaggcgctgggcgacttcttgcgggaattggaacgttatcgtcccggtgtgttgcgctgggatccgagcctggaaacgttgcgagtgaccggcagttttcgcctggacgacaccgacctcatcctcaacctgctggcccagaccctggggctggaactgcacgcacgcacacgctattgggtcaccctgacaccgcgcaaatcgctcacctgatgcgggtgtggtaattcttatatatccatatagaataaataaagagttatatattccttttgttgttgttgtcgatggcgcattttgagggcctgcgcattcgtgcggattgacccaacagccaaaaggaaagccgacatgaccattaaagcgatcaacgtgcgcaaccagttcaagggcgtgatcaaggaaattctgctgggggaagtggtgtcggaaatcgacgtgcagaccgcgtccggcattgtgacttcggtgatcaccacccgctcggtgcgtgacctcgaattgaaagtgggcagtgaagtgattgcctttgtgaagtccaccgaagtgtccatcgccaagctgtaaatgaccgcccccgcactcaggcgggggctgtcatgactcaagcgatcttcggtccactgccacccggtggatgcggctgcggtctctccggcggcgcatccgtcggcaggctcttgggtttcgcgttcgggtctttgtagcccttgtgcaagccgccgtccaggcgattgctcgacgagccacctttctgcggggtctggtcgaagtgttcccactccgattgctggaagcggaagatgctgtcgtcggtcggcgcgtcacggccaccgtaatggtggatttcatagtgggcgtattcgaccttgtcggcccagttgtcctgcaacagaccgtcgcccgccaagtcgcgataccagtcgttttccttctcggtggccttctgctttttgttgtggtcgacaaagtagccgatgatcccgccgaccaccgccagcaccacacccaccaggaacaacggcccggtcaacgccgccgccgtgcccgcgccaaacagcgccgcagcccccagtaccccggccgatgcaccgaacgcaccgccggccacttgcaggccgccggccgcctgggccaaggggtctttgtccttcacgccgctcttgatcgccagtgcgcccagtacgatgtcggcaaaaccgccggcaatgtccgtggccgggcccagcaccttgatcacggaaccggcgatctttgccgatttggacgcgccgagcttggccgcgcccgcagcggccaggccgtcatctaggtgggtggccaggccttcggtggcttcggtgacggccttgtcgccctcgccgaacagcttggagatgccgtcgtactggctgtccggcaccgcatcgagggccgtggcgatcttggctttgacatccgagggcagttcgctgacgcggaattcgaagttcggctcctgcatgccggtcttgccccagatctccggcagggtcttgtccagcccgaggaaatccaccaggccgcctttgcccaggctctcgccgatcttgtcgcccaggcgtacaaagtggctggagccgccggcaaaactcaggaagtccttggcgatggtcatgcgttgcgctggggtttcgccgagcttgccgcctttgcccaccagttggtaaatcccggaaaacaggctcacaccggcgcccagtgaaccgaggatgcctttgctgttgagggtgttgaacacctcgccgagcatgccgcgatcggccaccgggatgtagggtttgctcagggcggttttcaggtcagcttcgctgatcacgccgtttttctgatacacggcgcccagctcttccagggccttggtgacggcggcagatttttccttgccttgcaggccttcgttgaggaatttctccagggtttcctgggtgcggcgcggcaagtccagcacgttgcccttgagcacgcctttgagcaggccgaacaggtccttggtggccagctccttgttctcgtcggagatcttgctcgggtccgacagaatggcattcaggtcggtggtcaagccgtccgcctggatgttctgcgcggctttgctggcggccgccgggtcgaacagcgacagcgacgtcagggtatcgctgaggtctttctgcgcctcgtaggtcttgccctggctttgcaggtccttgaggtacaacacgtagtccgggttggaggtgaggtccagcagcttctgcttgatctcgtccttgttcggcagcttgttgatggcgtcgtccatcttcgacttgtagtcagcctggatggtagggtcgttgaacagttcaccgatctgtttttgcacggccttgccgtcgacgatgtcgtgcatatcggccgaggtcagctgggtctgcttgtcatcgaactcgcgccaggtggtgttgaacgggcgtttggactcctcgtagccggtgatgccgtggccgttctggtaggcggcttgcgcttcgagggcgcggaccagcttggcgcggggatcgtccttggcaatcgagccgttcttcacgccttcgcggtaggtgtcgatcagttgcgtggtggccagttcgctgacgctgagggtcggcgacttgtcgtccttttcatcggcgtgcacgccagtgtccatgttcagcacgtccagctcaccggacttgggcaggttgtgcttggtgcgggtatcgtccaccgaactggcactggaggcttcccacttggccgccacatcatcgtagagctgcgggctgagttccttggagacgatcaccttgccttcgctggtttcgtagcggatcaggccgtcgcccagttcatccggggagccgaaggtgatgtcggtgtttttcaggaagtcattcggcccggccagcttgtagccttcgccttcgctggtgtggatcttggcccaggtgtcattggcggtggcgacgctcttgaacagctcggggctgacgtcggaggacaccaccaccttggtgccgtcatgcagctcgtaggtgaggatgtggtctttctggtcgttgttccaattgaagttcttgtagtcgttcaggcccggcaccggggtgttggcatcggccagtatcgcgccgttattcagctcgccttccaccacggctttcttgccggggtcggtgtagaccgcgtgcaggccggccaggtagtcgaacagcttggggttgtcgtcgcgggccaccaccattttctggccgttgctttcaaagcggatcaggcccgggccgacttcatcctcagggcccaccgtggtgccggcgtagggtggccacacttcgttgtcgctggcgcgcttgtaaccggcgttttcactgttggacaggccggtgaagctggcataggcgtccttggctttctggaaggcttcggggttgtcgcgctggctgatgacgaccttggtgccgtcctgggtctcgtagcggatcacacccgggccggtttcatccggtgcgccaagggatttgtaatcggcgagtttgcccggcgcagtgccatcggtaccgaggctctggtagccggcattctggctggcgaccacgccggagagggacttgaagtcctggctgacctgcttgaacagctcggggctgtcctgttcgctgacgatgactttcttgccgtcctgggtttcataacggatcagcccagggccgacttcatcgggcgggccgatggccttgtagtcggccaatgccttgggcggcgtggcatccttggcggcgagttcgtagccgtcttttttacttgcatccagccccgatggtggcttgtcctgggcctcaacctttttgttgttggcgctttgcttgagcaacgcatggaactgcgcgccggacttgggcggcatgcggggaagggctttggggtcggacgagcgatcgaggggctgggtcgtcatgccatgaaactcctgctgttaccggtggggcgtatcggcaaaaacagtaacagcaggggttcggcacgcgttgcgaaaagttgtgaattgagtctgcggcagctttcaattcaaagtacgccataagttcgggagcggataagtctgataggcgcccaggatgcaggattggtacgttggcctgagccaggatactcaacgacagggacgccatgccataaatcactttccagagactacccgtgcattcagcgtcctccaccgccttgtcgatgtttcaatctccgaatctgcagaacacagacgctccctctgcggtacaacaaagaacacccgagcaaaatcgcactcgccgggatacctcaagcgcatcccggcaggatcgtgacgccccctccaacggtattccggataccgacgttccagagttatttcaacagaaagtggccacggctcggcatgagttcacccgcgacgactacttgcgcggctataacgcgccctcgtcagtagcattgcctggttatcactcatcaatgcgcgacgtggcgctcatgaggcttgcggtggataaccggttaagcccggaacaaataggtgcattacagcgcctggttgagcagcgtgtgatcaaccgttctcaacaatcggtgagccagttcacaaagataatctctacccatggcgtaaaggtgactcccgcaccgcaaagctactatctgtctatggtgaaccaggcatccggcggcgaatgcgcagggttttcacatttactctccatagcggcggcgcagggtaaacaccagacttttctgagtaatgtctattacgccatcgcaaatccgtatgcgccggaatcagaggagtttttccggaaagtcttcgaggttcaggcccgtgtaaaagatcgtgatattgcacatgaccctgcaaccgtgaaggccgccagctataccgagattgccccgcagttgttgaactcgccgtccacaaaaacgctcttgatcagcagtgaagggcatcgcctgaccgcaggcgtcatcgttgatccacaaggggggcgaacgtattacttcagtgatcccaatacgggttttactgaggctgtttcggcggaactgtttgaaggtgtactgaagaagatatataccgatcccgtcctgaaacagtttgtgcaaccgttgaaggcgtttccgggtgaacagaaataccttatcagcgtattcaatccagatcttattcccgagatatccggcgcatccaacgacatcaagttcatgtacaaccgtcctctgaatgggctggacactgtcacagtgctcaatacttcacggctgccgacggttgaggattcccgcctcaaggcgtattcccccgaacacaccgccatcaaagattatgagcgggtggtgcaagggctggacaacatgcaggccagcagaggcatgccgcagtatcaccaggcaaagaccgttctggaggccgtcaatctattcatcagcagccaccctgcttccgcgctcgtaccggctatggagacactcaggaaacgtttgacaagtgcgatcaatgaggcaattgcgcctgttgagtatccctatgtcttcgagcgtatggagcaagatcgtgtggcgttggccgagggtaaagtcggcttgtcgaaacatttccaaagtgaagtcattcagggcaagactgttgatataaagagtaatggtgatggtgaccccgatagggcagtacgggtaagagatgctgtagacgacgctctgaagaagctcgcgcagagcgatcctgcagcggcgcaggcgatcgggggaaaagtcagggtgattattgccaaccctggcgatcaaccagaaacgcggctgcactttaatagtccgccgacgttgatcattggtgatgatttttttgcgtcaccccctgcaactgacgctacagtcgccgatcgaatcggccatcaagctcaggcggacggaagaaaggtccaagcgtccaggcaggctgcgctgattgtgggcaagctggggatgttgggctattacaaagctgactcccaagggttccttgaggtggttaacaacaaggagccctttcgcgacggaggcagtaaagtcagcgcacgcgctgccagaagcccaggtgatttcatggaggagaccttcaccgcacgtgtatacgatggaaaggtcggtagtgaaaccgatgctgcgctcaataggcttttcgctccagcagctaacgctccaccacccagcaccccgcagccaccgagcacgccgactctgccggtcaacacgggagcattaccgaccacagcgggagggacgattgacgaggctgaagtaaaacgcctgcaagcacttgatgaaacccgcgcgcccttgcaaataggggaagcgagcgtcagccgagtcgaactttataaaatgggcgtgcacgtcaagggtaagccagttgaaaacacagtgcccatggatgccaaggggcgtatcagtggcgacgtggaaatagacttcgaccgtcttgtggcttttttgaagtcgacatcgcctgaagttggggcgcgcgtgacatccatcgccagtgaaattgctgtcaagcgcagccctgtcacggcccccttggtgacccgcagcgacggcagtcccgtccctgaacacttccagaagcaactacgtgacacatcacgacaggctgctgagatacgtgacgtgcagagcagcggcaaaccgctgcccgcaaattttttctccccggcagaaacatcgggaaagccgggggcgactaaagccgccggcctcggcttccaggcgttcagcacattccaggggctgtgcagttccatagagagttttcaacgtggcgatacgacggcgggggccatcgcagcgggcgctgtagcgtctgactacgtcgggatgggtgtagaggctggcctcaacaaaatggcgcagtcggcagtcaaaaccgtgacgccgacgataatgggcttcaagtcctcgacgataggcaagatgattggaaaggttgcgggtggggccagcgccgctatcagtgttccttttgatatcaaaaatgccgtcgattcgttcaataaagcggctggcagtaccggtaaggaagcgcaggatcactatgtcaacggtgcattcgccgtcaccaatgcggtgacttcgataggtttgagcgccgcatttctggccggcgcgagtactgccgggccggtgggacttgcagtggcggcaatattgatgaccgcacaagcgatttactcggccgtgcgtactgtggaggacatcaatgaatacacgccgctgtccggttcgaaaaagttcgaagtcggactgaaaacattcctggggtttgagcctgggtttgatgtcatgaagccttatctggaagcgaaatatgccaaggattacgacacgcagaagaggacgtatcatcaggccttcctggacggcccgggcaaagaccatttcgaacgtgttgtatttggcgctggggatgtagtcgtcacgcaggtgccgggaaaggttgaactgacaggccagcactggtgggctccgatcacctatttgctgaacctgatcaaagtggatgggaaagtcccatccgttaacatcaggggtgggaatgatcgtatcaatgcgcctgccgactcctggaacggcatgtcagtcaagcctgtggagggtgcacaggggacaggaaaggccacgctctgggacctgggcgatggcgatgacgaggtggcgggagtattcagcaaacccaactacttcttgttggggggagggaaaaaactgatcagtgggggagcggctgatgattcggttatcttcagcgctgatgcacgtcagaccctgcagcaggcagagcaggtctgggatactcagaacaataaagggttcagtaaaaaagccactgagctctggggcggtgagggccgtaacacactggtattttccggcagcttgagcaccacttacaccgaaggcaaagacactaaaaccgccagctattcagggcatgtcattgacttcaagaccgggttgatttcagtcagtacgccagactcgaaaacagaaggtacttctcccattgcctattttcatgagttttcaaatgccgccacagttgaaaatggcgaaagttatatcgtgggtgatgaccagagcaatctgtttaccttgaacggcaagcatgatgtggttttgaccggcaagggctccaatgttgtcgtgatcaatggcggcgctaacattgtcggagagggcggccccaatacctacatcgtcaacaaaagcgataaggaggtcaccatcaaggacccgaacgacagtgtgatcaagttggactacagcgcggcacaggtgtcgggatggagggtttcagcctcgggggacttgactgtaaaccttaagggggatgagcctggaagcgaacgtcaactggtagtccagaatgctttctccagcgattcaacgagtgacaaggcacggcccgcatttatcaccaatgacggtgtgatgatggcaatcaacgcgccacgccagcctggttcaggcacacgtgttgtgcaggtcagcagtgtcaaagtcgaaggtcccatgccccaagcctgagtccccgcgcagtagcaacagcatggggtgactggcaccggatacagtgccagtcaatctcagcgtttttgcaggctgcgctccatacgctgcaagccttcctccagcatcgaccgtgggcagccgaagttcaggcgcacgaattgctggctgtcatcaccgaattcgatgccggcgctcaaaccgaccttggcctgttccaggaagaactgctgcgggtcatccaggcccagggcactgcaatccagccaggccaggtaggtgccttgcggcgcgtgcatgaccacaccgggcaggcgggtctgcacggcgttgagcaggtagtcgcggttggcttgcaggtactgcaccaaggcgtcgagccagtcggcgcattcgctgtaggcggcgcgggtggcttccaggcccagggggctgacgctgtcgaccatgccacaacgggcgtggttgaagcgctcacgaatctcggcgttctgcaccacggcaaagcaggtcttcaggccggcgacgttataggccttgctcgccgacatcagggtgatggtgcgctgggcgatctcggggctgaggctggcggtggggatgtggcggcgaccgtcgaagcacagctcggcgtggatttcgtcggagatgatcaacgcgccgtgttccaggcaggcattggccacggccagcagttcttcacgggggaagactttgcccatggggttgtgcgggttgctcaacaacagcgcgccggcgccggtgagcgcctggcgcatcgctggcagtggcgtgaggtattcgccgttgaccagctcgaacggcacttcgatgcgcggcaggttccaatgccctggtgccaggcggatcggccggtagttgggggtttgcagcaccaccggttgccccggttggacaaacgcatgcagcgccatattgaaacccggctccacgcccggcaaaaacagcagctcatccggctgcacgcgccaggcgtacttggcccacaggtcggcgatgattgcctcgcgcacatccggaccggcgacgctgtagcccagcacctgctgatcgaggcgtgcgtgcagggccttgagcacggcgggcggcgcggcgatgtccatgtcggcgatccacatcggcagaacgtcttgcgggtagcggttccacttggtgctgccggtgccgaggcgggagtgaatcgtgtcgaaatcaaagctcatggggggctcgtatcagggcgtcaggcgcagggatggcgctgattctagcgccataatttttataggccagagctgattgcgagcgacagttgccgatgcgcctgttccaacgcgcgattgaccgcttcttcaccgcgcaccatggccggcaggtacacgaaatccactgactcaatgcccacggtcgccaggatggcggtcatgtacggcgtgaggaagtccggctcatgccccttgcgggcgttaccggaactgaccagcacaaaggtgcgccggtcttccagcaagccgaccttggcgaattgctcattcaccgtgaagctgcgctggatgcgtaccacatggtcgatccaggccttgagtgccgccggcacggtgaaattgtgcaccggggtgcacaggatcagcaggtcgcaggcttccagttcaacgatcaattgttccgagagtgccgtggcactgccgctcaggccgccgggtgtggtgagtgcgttggcatattcacgggtcaacggcggcagcgcctggccgccgtagtcacgttcggtcaccgcggcgtccggcaccaggtcgcgcagcagggcacgggccagtttgaaggtctgcgcggctttgccgtgggggctgaaaccaaggagcagggcacgggtcattggctgaggtcctgggaaaagtgcatgcctttgggcagcaggccctggcggaaatagaagcgctgggccagggccatgtgcatgccggtgtccagtaccagccagcgatagccacgggcgcgggtttcttcacgcacgcggtcgagcagttgttcaccgaggcggcgccgctgcaacgtggcgtctactaccaggtcatcgacatagataaagcggccatacagggtgttctcggtcagccggtagccggccaggccgatcacctggccgttctcccgtgcggcaagcaggcggtagccgttttgccgttggcgctggacttgctcggcgaatgccgtggcgtcgctgaggtgcgggcgcagctgctgcatcaccgcaaagctggcgatgagatcagtcgcggtttccacgtgggcgaattcgacgtgttcattcatggctgtggttctccaagtgggccttgatcgccgccggtactttgcgaaagctgatggcgacacggttaagggcgttcatcaagctgatggccagggtcaggtcggcgacttccttgtcgctgaacactgccgcgacctgtgcgtagtccgcatccggcacctgggtttgcgcgaccggcgtgaccacctcggcccaggccagcgcggcctgttcacgcggggtgtacagcggcagcccctcgcgccaggcggccagcaacatgattttttccaggctcacgcccagcttgagcaggtcgcgggagtggctgtccaggcaataggcgcagccgttgagttgcgagacccgcaggtaaaccaggtcgatcagttctttttccaggccgcagccgtggatatagctgtgcaccgagcccagggctttataaccggcgggggcggccagggcgtagtcgagacggtgtttcatgggcgatccttattgcggtgaagagatgcgccattttcgtggctggccgggtggcctgacaggggcatgattggacaagtgggttgggacatgatcagacttcggcctgtcttcccgccgagccacttgcgatgtcgtcactgcccaaataccaggaaatctaccggcgttttcgccaggccatcgaccagggccagttgcgccccggcgaacgcgtgccctcggtgcgggcgctggcccaggaactcaaggtggcgcggggcaccgtggaggcggcgtatcaactgttggtcagcgaagggttcttcgaagcgcgtgggcaagcggggacggtgattgccgaggcgttgccgcaggtgtcggtgaaacccatgccggttgcgctgccggcgacttcaggccttcggccgttgcaaatgggcctgcccgccctggatgcgttcccccgcaaattgtgggcacgcctggtcacccagcaagtgcgccgcaccgatgcggacagcctggcgatgggcgatgtgcgcggcacccaggcactgcgcgtggcgattgccaactacctggcgttgtatcgcggtgtggaatgcacgccgcagcaggtgtttgtgtgtgccgggtatgcgggcggcctcaccctggtctgcgaagcgctatcgatggcggggcagcgctgctggtttgaagaccccgggtacttgcatgcgcggcagttgttgaggcatcgcggtgtggaactggtgccggtgacggtggatcgcgatgggctggatgtggcgcagggcattgcacgggggcgtggggcgcgactggcgattgtcaccccggcgcaccagagccccttgggtgtggcgctgagcccggcgcggcggcaggccttgctggaatgggcgcgggagcagggcagttgggtggtggaggatgactatgacagtgaattccgctatcgcggccagccgttggcggcgctcaagagtcaggatgcggatgaccgggtgatctatgccgcaagcttcagcaagatgctgtttccggggttgcggttggggtatctggtggtgcccgtgtcactggtgtcgacctttgggcgtgcggccgaggcgttgcagcagcgtggggcgcagttgttgcaattgacggcggcggattttctggagcaggggcatttcacccggcatttgaagaagatgcgccagttgtatacgcagcgcagggggtatctggtggaggcgctgcgcgtgcattgcgcggggtatctgcgggtggatgagcaggcgggggggatcaatttgctggcgcggttggtggtggatgtgccggaccttgtcgtggctgaggctgccggtggggcggggttggcggttcaggcgttgtcttcctggacgcttgaggctgggcgggggcagggggtgttgatgggctttaccaatgtggcttcggcgtctgacgcggttgtggttgccatggttttgcgtgatgtgattggggggtgtgtatccgttatttagttcacggctactatttggttccgcccttacggccagctctttcaaggtctttaggtagaacaggcgataagtaccctgtggtgagcgggcttgtcccgcgttgggctgcgaagcagccctgaaactcgcgtctgaagagtgcctgactcaccgcattgcttcttccagggtcgcttcgcaacccaacgcggggcaaacccctctcgccacaggagcagtgttcgtctttgcgctggccggtcagtgcttgaccggggtcggcagggtcacgaggttgacgtagccatcccagaattgcttctggtccacgccgaacaccaccttggccttttgcgtgcccaccggggcacctttggcgtagcccagtgcgcggccgtagtcggcgccgaaggtggcgtccacatccacccacaggtcgcgggattcggtgacgattgcggggttgaccaggtacagcgccggcaggctgtcccaggtgaagctgtggtagctcgggtccttgtcgaacagcgggccgaactcatgcttgtacaggtcggcaatcgcgcctttgcgagcgatcacgcgctggtacaccgccttgtcgaaggtgactttctcgcacacatcgttggggaaaatcacgtgctcgatgggcgagcgcaacacgatctttgccgcctccgggtcgaaccaccagttgaactccgctgccggcgtggtgttgcccggaatctccagggcaccgcccatgtacacgatgcgcttgatcagcggcacgatgtccggtgccgagcgaatcgccagggcgacgttggtcagcgggccgacggcgaggatcgtcacctggtgcgggttggcgcgcacgctgtcgacgatgaactgcgcggcggtttccttgcgcagttgggtgtgggtggccaggccatccggtggtgcgaccaactgcgaaggagacgtcgggcgagggtgcttgaacgcccccggccagccggtaccgaacagcgtcttttccgcctcgtaggtggcgtagtcatgcagcaacgggtaggcggcgccggagtagacgcccacctctttctccacgcccatgcgttctacggccttgagggcgtcgacctgttcctggtcgacccaggcgttgccgctgaccagggtcatgcccagcagctcgatgcgtttctgcgcatgcagctgggcgagcatgatgaaggcctggccgtcatcgttgagcacattgaagtcggtgtcgaagatgactttttccgccgcctgggcggtgccggcacacaggccgaccgcgacaagcaacgcacagcgtttcaagaagccttgcatggtgattcatccgaaaaaatgtggttatcagcggttgaccagtttcgccggcaaggcgatgaccaggaagctgctgagaatcaggcaaccggcgaaaaaccacaaggcaccggcgctgctgcctgtgacgtcgatcgcaacgcccatcagcgagttgctcaccaggccggcaatattcgccaccgaacaggccagggcaaagccggtggccgccgcggtgcctttgaggaaggtcgccggcaggctgaaaaataccggcaccgcgccgatgatcgccgccgaggcaatcgcgaacagcgccacggtggccgccacgctgtgggtgaagaaggtgctggtggccatcgccgccgcgccgatgaaaaacggcacgatgatgtgccagcggcgctcgcggtgtttgtcggagctggcgccgatcaacagcatgccgagcagggcggcgacgctcggcaaggctgtgagcacgccgatatgaaaggtgtcggtgaccccggcgttgcggatgaaggtcggcatccagaaacccatggcgtaggcgctgagcaggatcgagaagtcgataccgccgagcatccacaccttgaggttgaagaacccgtcgcggaagctgtgcttgctggcggcgccatcggcgtcgtccttgcgcagctcggtttccagcagggtcttttcctcgtccgacagccatttggcttgctggtaggtgttgggcagcgcccagaaagtcagcacgccaagtaacacgctgggcaccgcttcgatcaggaacagccactgccagccgcgcaggccgcccatatggtcgaagtggcccatgatccagccggacagcgggccgccgatcacgctggacagcggcaggccgatcatgaacaacgcaatgatgcgcccgcgccggtgggtggggaaccaggtggtcaggtagtacagcacgcccggcagaaagcccgcttcggccgcgccgagcagaaagcgcaggatgtagaactgggtggtggaggtgaccagcatggtgcaggccgagagcaggccccaggtgatcatgatgcgcgcgatccagatcttcgcgccgacccgttcctgcaccaggttgctcggtacttcaaagaggatgtagccgacaaagaacaggccggcaccgaggccgaacgcggtttcgctgaactgcaactggtcgagcatttgcagcttggcgaaaccgatattgatccggtccaggtaggcggccagataacagaagcacaggaacggtatcagcttccaggtgatcttgtggtaaagcgtgttgacgggatcggcgaccgtggtcgccggcgctgcattcgcaatgggcatcgggtgtctcctggcggtgacttatggtttttttatacagccggcagttggtgtagggtcgcggaccgcgctcttatggcgcttttatggctaaaaccttattgctccctgaatttgcgcatcgcctcctgcttgctcaccacgtcgccatacttgctgtcgatatcgaacaggttggcttcatggggggccgggtgtcggtcgccgacgcattcgcgcacgacgatggtgcgaaacccgtgttgcacggcatccaccgccgtggcgcggatgcagccgctggtggaacagccagccagtaccacggtgtcgatgccttgtgcatgcagcatcggcgccaggctgctgccaaaaaacgcactggcgtactgcttggtgatcaccacttcatcggcctggggcagcacctcggcgcagaacgcggccagtgggttgccttcgaccatgtctttcatcaccggggccttcttgacccagattccgccatcgacgaaatggccgggatggtagcggatattggtgtgcaccaccgcaatcccgtgctggcgcgcgctggccagcagctccacgctttcagccacggccgtgaccacacccggtgcgaacagcggcgcgccgtcggtggtgtagccctgcatgaagtcgatcatcagcagcgcggcctttttgccaaagccgatgcggttgccccatacgccctggtagttggcgtcggcggattgttcgctcatcttctcaactcctcattcatgtttgctgtggcgagcgggcttgttgtggtgagcgggcttgccccgcgttggagtgcgtagcgctcccgctttttttggggccgctgcgcagcccaacgcggggcaagcccgctcaccacagaagcccgctcgccaccaccacagaagtgctttgcactccaattagtaggcaccggagagcagggcacccgcgccaggcacgatgggctccaggtccagggccttgagcatggcgtaggtggtagcgatagcggcggtgagcactggcttgccggtttgtgcctcgaccttggccaccaccggcagcgactgcatctgcacgcaggcggacagcacgatcacgtcgacgccttccaggttcatgccggcgacgatggccggcaggttggccgggtcgtggcgcgccacttcgaggttgtcggggatctccagggcgcgccagtccaccacgtcaaaaccttcttcgcggatgtagttcaccaccagttcggtcagcggcttcatgtacggcgcgacgatggcgatgcgcttggcgcccatgactttcaggccttcgatcaaggcgccggcgctggtgatgaccggggcgttggcatcgttgtcggcggtggccttgcgcaggcgttgttcggagttgcggtgatatccgagccccatggccatgatcgccaccaggcacgcataacccagcacgtctaccttggcgtcggacagttcgacggcgcaacggtcggactcaccgtccatggccgccagttcttccttgcgcacctgcttcatgcgcatgcggctggagtgaaaggtaaaacgctcgggacggatcgcctggcgcgcggtgagcatcgccgggatctcggtttccatggtggtgttggagctcggcacgatctggccgatgcggtaaggcttctgcatggtggtctccgtttttattgtgtgaggaagtcgccgagggcgtggaagaaaccgtcgaagtcatcccacggaatcatgtgcccggcgttgggtacgcaggcgacctggatgtgcggctgcaggtcctggatttcggcaacgtcctcatcgaggatcaccccgccgcgaccggccaccatcaacagggccggggccttgaggtgaggcagatcctggtggaagtccacgctgtggaaatcattgaaggcgcgcacgatggcgggctcatagcaggtgtgcagccattcggcacgcagttgcagttgttcgtcggtccaggtggcgcagaaggcacgcatcgcctcggcgtccatgccgaccagagattggcggatcgaatcgacgtaccacggcagtttgctcgggtactcacgccgacccgggccagacaccggcgggtcgatcagcaccacgcgcttcacgccctgcggatgtttgaccgcactgcgtacggcaaaacgggcgcccatggaatggcccatcaggtggtagctgtccaggttcagcgcatcggcaaaggcaccgatgtcgtcggcgcaggtatccgcgctgtagtccagttcggggccggtggaggacagcccgcgaccgcgcacgtccagcacataggtgtcgaactgctcgcccaggcgctccgcgacgaaaccccaggtgatcgcaggactggtgatgcccgggatcaggatcagcgccgagcctttgccgccgtagcgcaagtaatgctggcgaatgccgttggcctgcacgttgccgccgtagaggaaggtgctcacgcggccacccccgatttcagtgcctgggcgtacaggtcatagccgtagacccaggccggatcttcctgggtgcgcagccaggtgttggcgttggacactgcttgcacccgcgaggcgcgttccttgcggttggcttcgtacagctcgaaggcggtgcggtagtcgctgatgccggtttcctgcaggcagcgggtgagcatggcggcgtcttcgatggccatgccggcgccctgggccatgtgcggcttcattgggtggcaggcgtcgccgagcagtaccaggcgaccccggctccacagcggtagcgggttgcggttgcgcagcggccatttggtcacgctgtcggtggattcgatcaaggcttgcacggtggggtggtagcccttgaaggcgtcgaacatctcttcccggctgctgtcgacgaatgcgccctggaagtcccattcggggtggggtacgccggtcacgtagtagtactcgtcgcgcttgccggtggtgtagtagaccatcatgtggcggtcctcggtccaccacttgatgcagtcttcgaacttgtggttgtacttggcgagctggtcgccacggatcagtgcgcggtgcgcgacccagccgctgtagagcggtttttccacgcccagcagttcttcgcggatcttggaattgatgccgtcggcaccgatcacgatgtcggcgtaggtcacttggccgtcggcgaaggtcaggcgcacctgggtgtcggtttcttcgaggctttccaggcgtttgttgaagtgcagggtgccgggcttgagggtggacatctgcagcgcatgcaggtcgccacggtgcacggtgatgtaggacgcgccgtagccggtgagcggaatgcgcgagaggtagtcgccggtttcaccgcagcggctgaaccagtgctcggggtgcgaacccatctggtccagctgcttttcgatgcccatgcggcggaagattttcatgatgttggggcccatgtggatccccgcgcccaaccgggaaaactccggcgcctgctcatacacatcgacgtcgaagccggcttgctgcaacagggtggcagcggcggcaccgccgagaccggcaccgacgatggcgattttttgagtgcttcccatggggcgtgttcctctctcttggtgattctttgtgatgttcggcggcaactgtctgcaaggtttttaaagtgtatacgctcattttttgaaatgggaagcctgtcttggcaaatttattttttggccatatttatcctgtgtaacgctatgtatctagcaaatgctgggcgtgtatcgataggtaacgttatagtgcgccgcttgcagtctgttcgcaattcggttcttatcgttattaaatggcgtatacgctataaaaatgcactagagtgaagcgcagtgcatgaacttggtgcagacccacaggagacaggaaaatgccggtaagcgattgcgaattgacccagatgttcgagcacgtgttgaagctgtccaaggtcgacccgacccagagcgtcgccgtgctcaagagccattactccgacccgcgcaccgtgcgtgccgccatggatgctgcgcagcgcctgggggccaaggtgtatgcggtggagttgccttcgttcaaccatcccaaggcgatgggcaacgacatgaccgcctactgcggcgacaccgcgctcactggcaatatcgccgcgcagcgcgcccttgaagcggcggaccttatcgtcgacaccatgatgctgctgcactcgccggagcaggagcagatcctcaagaccggcacgcgcatcctgctggccgtggagccgccggaagtgctggcgcgcatgctgcccaccgaggaagacaaggtgcgggtgctggcagccgagcagttgttgaagaaggcgcgttcgatccacgtcaagtcccgcgccggcagtgatttccgtgccgccctggggcaatacccctctgtgaccgagtacggctttgccgatgaaccggggcgctgggaccactggcccagcggcttcctgttctcctggcccaacgaagaaaccgccgagggcgtgctggtgctggacatcggcgacatcctgctgcccttcaagacctacacccgcgagaagatcaccctggaaatcgaaaagggcttcatcactaaaatccatggggggttcgaggccgaatacctgcgtgactacatgaagtacttcaacgaccccgaggtgtacggcatctcccatatcggctggggcctgcagccacgggcgcagtggacggccatgggcctgcacgacaagaacgacggcatgtgcatggatgcgcgggcgttctacggtaatttcctgttctccaccggaccgaacaccgaggtgggcgggacacgcaagacgccgtgccatatggatattccgctgcgtaattgcgacgtgtacctggatgatgaggcggttgtgattgcgggggatgtggttgccccagcaggctccctggcccgctgattaacccatgtgggagggggcttgcccccgatggcggnnnnnnnnnnnnnnnnnnnnnnnnnnnnnnnccgccatcgggggcaagccccctcccacatgtagactacattcgagcatgagaaacttgagtgcatccaacaacgaagccatcatgcttccccatcgccagccatccaccgagccccgccgtgcctgattcttacgtcttttctgaacaagttggccacctgctgcgcaaggcctaccagcgccacctggcgatcttccagcagaatgtcggcgactcccagctcaccgccgtgcagttcgtgacgctgtgtgcactgcgcgatcacggtgcaagttcgctgaccgagttggtcaaggcgaccgcagtagaccaggcgaccattcgcgggatcgtcgagcgactcaaggccaaggcactgatcagcctggaaccggacccgcaggacaaacgcaaggtggtggtggacctgtccccggcaggtgccgaactggttgcccagaccgcgccccgtgccgcgcagatcagtgaattgaccatgagcaatctcaacccggccgaacgggtggcggtactgttcctgttgcgcaagatgatcgacgatccccaggaatagtcactgctggcaccgatcttgctctaagttcgtgtagtaaccacttcaccagtcaagtgtgtcgcgaggccccaggtccgtgatgcttttttttgactgtttcatgtagtgattacttcaccaactgttacgggcgaagcacatgatcagccagcacatcacagtagcgcttgaggtcaacgggcaaacacgcgaagtcagcgctatggcggacacaccgctgttgctggtgctgcgcaatgacctggaactcaatggtcccaaatatggctgtggcctaggggagtgcggtgcctgcaccgtgatcatcgatggggtggcggcgcgcgcctgtgtgtttccgttgtcgggggccgtgggacgcgagattgtcaccctcgaaggtctgggcacgcgccaggcgccgcacccggtgcaacaagcctttatcgatgagcaggccgcgcaatgtggctactgcctcaacggcatgatcatgaccgccaaggccttgcttgaccgtaaccccaaccccagcgaagcccaggtgcgcaacgagctgtcgggcaacctctgccgctgcggcacccatatcgaaatcctgcgcgccgtgctgcgtgcggcccgcctgctgaccgtggattgatgaccatgccgaacattccgctttcccgtgaccaatggctggccaaggccggcgtcctgttgatcgtcgatgaggtgctgccgccttcggggccggtggccaagggtggcacgcctacggtcaagcccaaggagcttggactgtttattgcggtcaacgatgacggcctggtgtatgcgttcaacggccatgtggacctgggcaccggcatccgtacgtcgctggcgcagatcgtggccgaggaactggacctggcgatggaccaggtgcagatggtgcttggggataccgagcgcgtgcctaaccagggcgcgaccattgccagcgctaccttgcagatatcagcggtccccctgcgcaacgcggctgccgaagcccggcgttttctgttggcgcgggcagcgggacgctggggtgtgagtaccgccagcctgaaagtggaggctggcgttattcaagcgccagatgggcgcaccaccacctatagcgaaatggtcagcggccagcacgaccagctgcgcatcagcggtgacgcgccgttaaaggccattgaggactatcgcctggtgggcaagggcgccgcacgggtggatatccccggcaaggccactggcgaactgacctacgtgcacgacatgcgcgtaccgggcatgctccatggacgggtgatccgcccaccgtatgcggggctcgattgcggcgattttgtcggcaacagcctgttgagcgtggatgagtcctccatcgcccatattcccggcattgttgcggtggtggtcatccgcgattttgtcggcgtggtcgcgttgcgtgaagagcaggcgatcaaggccgccagcaccttgcaggtgcactggaagccctggaaccacgccttgccggacatgcgcgatgtcgagcaggccatccgcgacaaccctcgcgtacgccgcaccgtgcttgaccagggccatgtcgatgaagccctggcgggggccagccagcgcatgccgcgcagttacctgtggccgtaccagatgcatggctcgatcggcccctcctgtggcgtggcggattactcgccggccggcagccgggtgtggtcgggcagccagaacccgcacctgctgcgcgccgacctggcgtggctgctggagtgtgatgaggcgctgatcgatgtgatccgtatggaagccgccggctgttatggacgcaattgtgcagatgatgtgtgtgccgatgccttgctgctgtcccgtgcagtcggcaaaccggtgcgcgtgcaattgacccgtgaacaggaacacctgtgggagcccaagggcactgcgcagttgatggatgtggatggcggcctcaacgccgatggcagcattgccgcctacgactttgaaaccagttacccctccaacggcgcgccaaccctggcgttgttgctgaccggccgcgtggaaccggtggcggcgatgttcgagatgggcgaccgcacctcgatcccgccctacgacatcgacaacatgcgcgtgggcatcaacgacatggcgcccatcgtgcgtgcgtcgtggatgcgcggtgtgtcggcgctgcccaacaccttcgcccacgaatcctatatcgatgaattggccttcgccgccggtgtcgacccggtggaataccgcctgcgctacctcaaggacgagcgtgccatcgacctggtcaaatccaccgccgagcgcgccaactggacgccgcgcaccgcgccgatgcaaaccgccaacgacgatcacctgctgcgtggccggggctttgcctacgcgcgctacatccacagcaagtttcctggtttcggcgcggcctgggcggcatgggtcgcggacgtagccatcgacaagcagaccggtgatgtgtcggtgacacgcgtggtgatcggccatgactcggggatgatgatcaacccggctggggtgcagcaccagatccacggcaatgtgatccagtccaccagccgtgtgctgaaggagcgcgtgacctttgaggagtcgacggtggcgagcaaggagtggggcggctatccgatcctgaccttccctgaggtaccgcagatcgacgtgatgatgatgccgcgccaggaccagccgccgatgggcgccggtgagtcggcctcggtgcccagcgcggcggcgattgccaatgcgatctacgacgccaccggcattcggtttcgtgagctgccgatcaccccggagcgggtattggcggcgctgaatgccggcaccttgggcgagccggccaagtcgccggagaaacggcgcaaatggtggttcggcgcgttgttcgccaccttgggcgcggtgttggcgacggcctggcccttccacaatgaaatcgccccgattgcgccgcccagcgccggcacctggtccaaggccaccctggaacgcgggcgcttgctcgcggcagtcggtgattgcgcggtgtgccatacggcgccgggcggtgcgaccaatgccggtgggctggcgatggaaacccccttcggcacgctgtacagcagcaacatcaccccggacgtgaagaccggcatcggtgcctggtcgtacccggcgttcgagcgcgcgatgcgcgatgggattggccgcgacgggcgcaacctgtacccggcgtttccctacacggcgtttcgcaatatcaacgatgcagacatgcaagcgctgtatgcctacctgatgtcccaggcgccggtgagccaggcgccgacgccgaatgccatgcgctttccgttcaatatcaggccgttgatggcggggtggaacgcgttgaacctgcgacgcggagaaatcaccccgcagcctgagcgcggcgagcaatggaatcgcggcaattacctggtcaatggcctggggcattgcgcggcctgtcattcccctcgcaatgtgatgggagcggagaagggcggcaaggcgttcctggccgggggcatggtcgatggctgggaagcgccggcactgaccggcctgtccaaggcgccgacgccatggaccgaagatcagttgttcacctacttgagtaccggctattccgatgcccatggcgtggccgcaggcccgatggggccggtggtgagtgagttgtcgaaactgcccaaggcggatattcgcgccatggcggtgtacctggcatcgctcaatggcgaagccgcagccgaggcccaggtggcggcggcggtcagcgtgccgaatcccaatggccgacgcgtatttgaaggttcatgcaaggcctgccatgccgatgggctgggaccgaagctgtttggggtgagcccgtcgctggcgaccaataccaatgtgcacagcgaccagccggataacctgatcaaggtgattctgcaaggcatcagccacccggcgaccaaggacctggggtatatgccggggttcaaggacagtttgtcgaacagccaagtggtggatctggcggcgtatctgcgcgggcaatttgcgccgaatacgccgcagtggaaggggttggagcagaaggtggcgcatctgcgtgccaaccccggcacccattgacgcaatggggtaaaacaggtgggagggggcttgcccccgatggcggtgggtcagctagacataggctggctgatgtacctgtatcgggggcaagccccctcccacattttgattgggtgtttacagggagggcggggtgacgccacgtatcactaaatcactgataaaactcagccaatcctgctgctgccctttgttcgccaggtcttcaccgaggaatgagctgagggtatgccggttggagttatagaagtagcacagcgaggcgatcatcaagtacacgtgcttgaggtcgacatcctggcgaaacaccccctgggcctggccggcttcgatgatcggctttaatacgcccacggcttcaccggacaacctgcgcatctcgccggattgctgggcatgcttgccttggtgcaggttctcgatgctcaggatcgccacgaattccgggtgcttgacgtagtaattccagataaacgccaccaggtcgcgcagggcctgctccggtgcgtccaggtccagcttgagcttgctttcggctttgttgaactgctcatagatgtgttccagcacgcagacgaacaggtgttccttgctgccgaaatagtaataaagcatgcggtcgttggagtcggcttccttggaaatggtgtcgacacgcccgccggaataaccgtcacgggtgaacaccttgaccgccgcctggaggatgcgcgcgcgggtctggtcggcctgttgggcgcggatgccggtcttcttgatcatcaccatgtcagagcgccttgcgggacagtcagggcgcgaaatatagcatgggcgttttcaggtccgttctgtgaccgacaagttctgtaataaaaacgccattgcgctggggattaaatccgcaacgggctattttggtgcgtcccaataactagagtagccatggatgaaataccaacctttcagccgtaccttgattgccacagccctggtgttgaccgtcagtggtgtgcaagccgcttcccaggccccggtggccggtgaaaatggcatggtggtgacggcccagcatttggcaactcatgtgggtgtagatgtgctcaaggccggcggtaatgcggtcgacgctgccgtggccgtgggctatgcgctggcggtggtgtacccggcggcgggcaacctgggcggcggcggtttcatgaccgtgcaactggcggacgggcgcaagaccttcctcgacttccgcgaaaaagccccgttggcggccaccgccgacatgtacctggacaaggacggcaaggtcatcgacggcctcagcgccaagggccacctggctgtcggcgtgcccggcaccgtgtcgggcatggagctggcgctgagcaagtacggcaccctcaagcgcgcccaggtcatcgccccggcgatcaagctggcggaaaacggctttgcgctggagcagggcgacattgacctgctgcacaccgctaccggcgagtttgaaaaagacaaggacatgcgcgggattttcctgcataacggccagccgatgcaggtcggccagaagttggtgcagaaggacctggccaagaccctcaaggaaatctcggccaagggcagcgacggtttctataaaggctgggtggccaaggcgctggtggattccagccaggccggcaagggcatcatcacccaggctgacctcgacaagtacaagactcgcgaactggcgcccatcgagtgcgactaccgtggctatcacgtggtctcggcaccgcctcccagctcgggtggcgtagtgatctgccagatcatgaacatcctcgaaggctacccgatggctgatctgggctatcactcggcccaaggcctgcactaccagatcgaagccatgcgccacgcctacgtggaccgcaacagctacctcggcgacccggacttcgtgaagaacccgatcgagcacctgctggacaaaaactacgcggccaaactgcgcgacgccatcgaaccgcagaaggccggtgactcccaggcgatcaagccaggcgtgtcaccccatgaaggcaacaacaccactcactattccatcgtcgacaagtggggcaacgctgtgtcggttacctacaccctcaacgactggttcggtgcgggcgtgatggcgagcaagaccggggtgatcctaaacgatgaaatggacgacttcaccgtcaaggtcggcgtgccgaacatgtacggcctggtccagggtgaagccaacgccatcgcaccgggcaaggcgccgctgtcgtcgatgagcccgaccatcgtgaccaaggacggcaaggcggtgatggtggtgggtacgccaggtggcagccgcatcattaccgcgaccttgctgaccatcctgaacgtcatcgactacaagatgaatatccaggaagccgtggacgcgccgcgtttccaccagcaatggatgccggaaaccaccaacctcgagcggtttgccgtgagcccggacacccagaagatcctcgaaagctggggccacaagtttgccggtccgcaggatgccaaccacttggcggcgatcctggtgggcgcaccgtcgctggatggcaaaccggtgggtaacaaccgcttctatggggcgaatgacccgcgtcgcaatacggggctgtcgctgggctactgaggcgtgaggtggtgatgcaggtgggccagggacagcgccaggctgtcgtgggataactggatggcggcgccttcggcgctgccctgggccgccggtatcacccgttcgaacatgtggttttcataggcctgcactgcggatgagcagtcgggtgtctccagcaggtgctgcgccagttcagccgcatccagcatcgccgcgttcaccccttcgccgccaaacggcgacatcagatgggccgcatcgccgatcagtgtcaacccctggcggtgggaccagcgatggccgacgggcagggcgtagatcggtctcgccagtaccgtctcgttcgccgcatcaaacaatgccaatacctgcgggtgccagccatggaactgggctttcagtgcgggcaggctgaggtgatcggctgcccagtcggacggtacacggaagatcgcatagccgcgcaaatgcgcgttggcgttgcgctgcacgatgatcgccttggcttctccggtaacctgcagggtgcctcggccaaccagtccggcgagatgcgggtgctgacagtctgcatcgtcgatgccgaattcgataaaggtcaatccgctatattgcggctgataggtcgacagcagcgggcgtattttcgaccaggcgccgtcggcacccaccaccaggtcgaagggcccgtgggtgagcgcgccctgatgaagtgcccagcgtccatcgccggtcggacgcacgtcggtgacgctgacaccccagctcacacagtcttgcggcagtgaatccagcagcgcctggcgcaaggcggtgcggtcgacttcagggcggtcgcctgcgctcgggttgggggcttcgaacagcaagcgcccatgctgatccatcaagcgcgagccttggtcttcgtaacgggcgatgcgtttgaacgcgtcctccaggccggcacgctgcaaggcgagttggccggattcggcatgcaggtcaagcgtgccaccttgtgggcgctccagcgggctacgttcacgttcaaacacgctggcgttgacgccatggcggtaaaggattcgcgccaaggtcaacccgccggggccggcgccgacgatggcgatgcgcaacgaggtatgcatgaagttgtccttggcgatgtttacaggatcctatacatttagttcataggatcctatggaaagtcaacgccctcatgaagattcaaacgcctgctccaaaccccatgcaacagatcggcatggcgaaccgggggttcatccgcctctacgaaggtcgcctgagagcgctgggctttgctgtcgcgcagattccggtgctggtggcgctcaagcgcagcggggggttgccgcaggccgaactggtgcgcatcgcccgtgtcgagcaatcgagcatggcccagttgctgggtcgtatggagcgtgacggcatgatcgaacgggtggctgacccggctgacaaacgcagccgcttgattaccctgaccgacgcggcgcgcgaacgcatgcccgccgcccgcgcgatcatgctgcaaggcagcgcgcaggcgctggaggggttcagtgaagaggaggaggcgaccttgctggcgttgctgctaagggtgaatgccaacctggagcgtgccggagagtagctgttcaaccactgcaaatgcgctggcgcggcgctgtgcccaatgaccacgaatcaccagggcgggctgctgatggtgctcgatccactccaggccgcctcggaagaacgcttggcggtcggccagctccggctggcagcgctggccgtcggcggtccattccacatcgtccggcgagagcagcaggtgcaggtcgtagtggcgggccagcagttcgctgtcgagccaggtggggtagtcgccgaacagggtctggctccagagcttgttggtcagcaggtgggtgtcgaggatcagcagttcgggctgccgggcgcgggcggcgtcttcccaggccagttggcctcgggcaatggccgggatgtcggccagggtggtgtcgcgctgatggtgatcgatgaaatggcgtacgtattcaccgaccatcaacccgccgaaatgcgcttgcaactctgccgccagccagcttttaccgctggattccgggccggccagtaccaccaccttcatgggtgcaacgccgggtcggcgcgccattcacgccagccttgcacggcgatcacggtgaacagcgcgtagagcgctgcggtgaggtacaggcctttgtagaggaacagcccgacgaagatcacatccaccgcgatccacagtggccagcactgcacacgtttctgcgccatccacatttgcgccaccaggctgaagccggtgagggcggcgtcgagccagggctgggcggcatcggtccagtgggccatggccgcaccgagcagcaggctgcccaccgcacccacggccaggctggcgatgatcgccggcacgcccaggctggtgacctggcgcccttgcttgacctcgccggcgcgggtccactgccaccacccgtagacctgcagcgcggcgtagaccacctgcaagagcatgtcggaatagagctttacgtcgaagaacacccaggtgtacagcaacaccatcaccagcccgatcggccagcaccaggggttttgcttgaccgtcagccataccgcgatcaccccgagggcagcggcgaacagttcaagcccggacatggtggttccttgggagagtgggagagggcggggattgtaaccaaagaagaatgctgcgggcattatctctgtagtgagcgggcttgccccgcgttgggctgcgtagcagccccataaatacggcgcgtactgcctgacagtaagcggtgtctggttttagggctgctgcgcagcccaacgcggggcaagcccgctcgccacaacaagcccgctcgccacaagcagcatcagattttgaattggcgcagcaggccgtcgagctgttcactcaggccacgcaactgtccactcgccacgctcgattgctccgccgccagcgcggtgctgtgggacaagcccgccgcctgggtgacgttctggttgatgtcttccaccacatgagcctgttgcagcgtcgcgctggcaatcgaggcgttgaggccgttgaggttgcgcagcgcctggccgatggcggtcaggctggccccggcctggccggcttgttcgatggtcagttgcgaggcgctgtggctgtcgctgatcaccttgaccgcggcttccgaatggccttgcaggcgttcgatcatgccctggatctcggcggtggacttttgtgtgcgctgggcgagcagccgcacttcgtcggccaccaccgcaaagccacgaccttgttcgccggcgcgggctgcctcgatcgcggcgttgagggccagcaggttggtctggtcggcaatcgagcggatcacttcgagcacgctgccgatctgggtgctttcggcggacagggtgcggatcacctccaccgcctggctgatggtgccggagagctggtcgatctgctgcaggctgccgtcgatattgacctggccttgctgcgcctgggcctgggcgtcgcgcatttcgctggcggcgtgttcggcgttcttggctacatcctgcacaccgtaggtgacttcgttgatggcggtggctaccagttccatctgctgggactgctgctggctgcgatcatgggcctgggtcgcattggtgcccagttcctgggacgactggcccagggcgttggcgcattcctgcaactggctgaccacctggcgcagcttggcggtgaagctgttgaagtgccgggccagttgggtgacttcgtcctggccgtgggtgtcgaggctgcgggtcaggtcgctttcgccgctggcgatgttgcccatggcgttcaccgcgtcctgcaacggccgcacgatgctgcgggcgatcagcgctaccagcaacgccatgagcaccgcgatacccaggccgataaacgaggctttccacacctggccgctgaactcggcctgcacatcgtccacgtacaccccggaaccgatgatccagccccacggctcgaacagttggatgtacgaggtcttggccaccggcgcttccgcacccggtttcggccagcgatagttgacgatgcccgcgcccttggccttggccaggctcacgaattcgttgaacaccgcaaaaccgtcggggtcgcggatggccgagaggttctggccgtcgagcttggggttggccggatgcatgatcatcacgggcgtgaggtcgttgatccagaaatagtcgtcgtggtcgtagcgcaagccgcgcacggcactcagggcttgtttctgggccgcttcgcgggtcatcacgccggtggtttcgaggccgtgataaaacgtcaggatcccgctggcggtctggaccacatgttgggtctgttggcgcttggcctggtaaaggtcgccgtggatctgcttgagcatcagcaaacccagggccagcagcatcagcacggcgactatcaggatcagccagagacgccggctgatcgacatattgcgcaaactgttcatcgtcctgtcactccgtgctttttataattgtgggcgccgcatcgacttttccgccttgtctgataggctttcggcctgtattcggaaaacctgaatactgtctgatttttcacaagatttttgcgtgccggggttgagaatcagccccgggtcttgtcgtcagtgaaccattaaaaagatcagcaaggcttgccatagagcaagacctttgggggaagcatggatttttggaccgccatacaggcattgattcttggcgtcgtggaggggctgaccgagttcctgccgatttccagcaccggccaccagatcatcgtcgccgacttgatcggcttcggcggcgagcgtttcgaggccttcaacatcatcatccagctgggggcgatcctcgccgtggtctgggagtttcgccgcaagattctcgacgtggtcatcggtttgccgagccagcgcaatgcccagcgctttacggtcaacctgatcattgccgtgttgccggcagtggtattgggggtgatcttcgccgacctgatcaagcactacctgttcaacccgatcaccgtggcgaccgccctggtggtgggcggcatcatcatgttgtgggccgagcggcgccagcaccggacccatgccgagagcgtcgacgagatcacctggaaagatgcgatcaagatcggcttcgcccagtgcctggccatgatccccggcacttcgcgctccggtgcgaccatcattggcggcctgctgttcggcctgtcgcgcaagaccgcgaccgagttttcgttcttcctggccatgccgaccatggtcggtgccgcgctgtactcgggctacaagtaccgtgacctgttccagccggcggatttcccggtgttcgccatcggcttcgtgacctcgttcatcttcgcgatgattgcggtcaaggggttgctcaagttcatcgccagccacagctacgcggcatttgcctggtaccgcatcgggttcggcctgctgatcctggcgacctggcagttcggctggatcgactggacggcggtcaagccttgagcatccagtatccgcgcttgaaggcggcgatctttatagtgttgtgcgcagcgccgttgataggggccgccctggtctggtatcgcggcgagacgctgatcccgctggcggcctatggcgtggtcagcgtgattgcgtttttcctgtactggagcgacaagcgcaaggcgcagagcgaccgctggcgcaccccggaaaacatcctgcacgccgtagagctggcgggcggctggccgggagcgttgattgcccagcaggtgttccgccacaagacgcgcaaggtgtcttaccaggtgctgttctgggtgatcgtgttgctgcatgaggtgttctggctggaccagttgttcctcggcggcactttgctctcagtcctctagcagcaacccgacctgcgtgcgcttgggcaacttgctcactaccaactggtgggagcgttgcaacaagccacgcagttcttcggcgcccagcgggtagggcgtgttcatgatgacccactgcgcacgcgccaggtacggcgccgggtggatgcccgggcgatccacatggccgaggaacagctccttgtcgaccttgaacgccagcgagtcaccgcgcaggttttgcagggcgaacatcttgttgccggcaatcgagaacacccgcactccaccccatttgtagtcttcgcgcgcgccgggcagtgccaggcagaacgccgcgacttgtgcttcggtcatcttcatagcaagcggtctccacagcctttgaagccttcctcaaggtagtcgatccaggcgcggatcgccggcagcacgccgcgccgatgcgggtagaccgcctgcagccaaccgcccggcaacgaccattcgggcagcagttgcaccaatcggccgttcgccaattcctcttcgcagtacatcatcggcagtacggtaaagcccaggcccatgatggcgctggctttacgcacgataaaatcgtcgatacccaggcgggcttccatcgccaggtcgtgggcgttgccctgggggtcgagaatgcgttgatgcaccaggcggtccgcctccagcgcgccgagaatcggcaactgcttgaggtcatccagggtcgcaacctgacgcccgagcatcagcgtggggctggccaccagcacggtctgggcctggcgcaggcgtttggtcaccaacagcgggtcttcatcgccgagttcgcgcacgcgcaaggccacgtcgatgccttcggccaccaggtcgacgcggcggttgaccagggtcatctccaactgcacctgagggtgggcggcaagaaaaccggcgaccagctccggcaggatgtgctgggccatgcccaccgggcagctcacccgcagtcgcccacggggctcgctggacatgctggccacggcctcatcggccatttccgcctccagcagcatggcctggcaatgacgcaggtagcgctcgccaacggcggtgagggtgagttgacgggtggtacgttgcagcaggcgtgcgccgaggcgctcttccagctcggcgatgcgccgcgacagccgcgacttgggaatccccagcagccggccggcggcggcgaaaccgccggcttcgacgactttggcgaaatagtagaggtcgttgaggtcttgcatgatcaacctattgtcctgtcaatgggacgaactatccgcgcctgacgagggcaaatccactacaaatgcgcaccgcccatcaacacatacttcacctgcacgtactcttcgatcccgtagtggctgccttcacggccataaccggactgcttgatcccgccaaacggcacggacgcggtgccgaccgaccctgagttgagaatcaccatgccagcctccaattggcgcgacaggcgcaacgaccgccccaatgcgctggtgtaggcataggcgaccaggccgaattccgtctggttggcgcgggcgatcacttctgcttcgtccttgaacgagtagatggcgaacaccggcccgaagatctcctcggtggccaggggggagtcgtcctgcaagccggtcaatatcgtcggctcgtagaacaggccgcccttggcgtggggtttgccgcccatcagcacgctggctccggcagccttcgcggcctccaccaggcgcacgaccttgtcgaaacccgcttgattgaccaacgggccgaccacaaagccttcacgcaggccctggtccacttcgatctcggccacggcgtgcttcacgcgtgtgatgaagtcgtcgaggatgctgtgctgcacaaagatccggttcggcgagatgcatacctggccggagttgcgcagcttggcaccgaccagtcccttcaccgcctcatccaggttggcgtcctggaacacgataaacggcgcgttgccgcccagctccagggtcatcttcttgatgctcgccgcgcattgtgcggcgagcaatttgccaacgccggtggagccggtaaacgagatcttgcggatacgcgggtcgcccgtgaggatcaggccgatcgccttgggatcgcccactaccacctccagcacgccttccgcgatcccggctttgcgggcgtattcgagcaatttgaacgcggtgagcggcgtatcctcggcaggcttgatcaccatggtgcaaccggcggccagggccgtggcgaccttgcgggtgatcatcatgaatgggaaattccatggggtgatcgcggcgaccgggccgatggcctccttggtcaccagcacagtcgcgttgcggtcatgggtggggatcgtgtcgccgtacacgcgtttggcctcttcggcataccactcgataaaacccaggccgtagtcgatctcgccacgggcttcactgaggcatttgccgttttcgcggcagagcaattcggcgaaggcttccttgtcggccttgaccgcgtcgtgccagcggcgcaggcggtcgctgcgctccttggccagcctggatgaccaggcgggaaaggcggcgcagacacggtcgacggcggctttgacctggctgctggtgttctgggcgacgcggccgacttcttcaccggtagcagggttgtagacgataagcatggggagtctccgagggctgaaagtgctgtttcaggctacgcagagacagtgtttgagcgaatatccattccaatgtgctgattgcctattcctatgaggacgtagcctggatgtggattgcgcgttaccgtggcactttgcacagaggcctggatccatggaccgtacagacagaatcatcgcgctgatggacgccctggcgcctgtcgagggctataacctgagcgcactggacgacgtgcgcttcctgcgctccaaccgtccgttgcagcgggtgccggtgctgtacgaccccggcatcgtgattgtctgccaggggcgcaagcgcggatatctgggggatgaggtctacctgtacgacgcccagcactacctggtggtgtcagtgccggtgccgttcaccatggagaccgacgccagtgaagccgagccgatgctggcggtgtacctgcgcctggacttcaccctcgcggcggagctgatggtggcgctggatgagtttccagcgctggtcgacgccaagccgcgcggcatgtattcatcgcccatggatgacttgctcggtgagtcgttgttgcgcttcctgcaagccatgcgcacgccgatggacgcgcacatcctcggcccggcgctgatgcgcgaaatctactaccggattctcacgggcgagcagggcggttcgatgcgcgccgcgttgaatcgccaggggcagtttggcaaggtggcgcgggcgattcgcaagatccatgggtgttatgcccagcacctggacgtggaggcgttggcccgggaggcgatgatgagtgtgccgagctttcacgcgcatttccgcacggtcaccgacacctcgccgatgcagtacctcaagtccacgcgtctgcaccaggcgcgtttgctgatgctgcgcagcgatatcagcgccgccacggcgagtgccaaggtcggctatgaaagcgcatcgcagttcagtcgcgagttcaagcgcttcttcgggcgcacgccccaggcggaaatccagtggatgaaacgcacctatgcgttgccggcgcctacgtcggcgtcgatgtacgtctcgtcccattgagcagggtcagcagcagcgccaacccggcgaatgctgcgccggtcagcgcctggccttgccagccgtagtgcgctgaggcaaaggcgccgctggccgagcccagggcgcccccgatgaagtagaccaccatgaaaacggtgttcaggcggctggtggcggccggttccagggccagcacgcgggtctggttggcgagctgattgatacggttgccgaggtcgaggaaggtcgccgcgatcaggatcggccaccaccagccctgggggccgaacaggtagatcagcacgaaggccgccagcacggtagtaataccgagccattccagaaaaccgccgtggcgccgagtctgccggccgatggtcgaggcgcagagaatgccgacgatggcggacaacccgagcaggcctgcctgggcgctggagaacccgtagggtggcgcggccagcagcgcggccatggagccccagaacacgttcagcgcaccgaaaaccagtgcagccttgatcgccgattgccgcagggtggggtactgcgtcgccaggccccacagggactttagcaaggctccgtacgccagtttgctggtggagaccgaggcgggcatgcgcgtcaggattgccatgaacagcagcacatccagtgcggcggcgagggcgaacatgccgcgccagcccagccagccgctgaccacgccgctcacagtacgcgccagcaggccgccggcggacaggccgctgaccatcaggccaagcaccgcgcctttttgcatggggtcactgaggtcggacgcggcggggatgatcacttgggcgctgatacccgagaggcccagcagtacgctggccaccagcaacacggcataggagggggcggtggccgaggccagcaggctggcaaagttcaggcacagcaccgcaagaatcaaggtgcgacggctgatgcggtcgcccagcggtacaaacagcaacagcccgcaggcgtaacccagctgggtgagcatcgcgatctgcccgacatgggcggtggacaccccaaatgtgtccgcaatcagcggcagcatggcctggttgtaataaatcgtggcgaccgaaaacccgcagcagatggcgagaatcagggtcaggcccttggtcagggctggggcgtgtggctgcatggcgggctcagtggtgatcgcaatggcggcgagaatgcagcgaagctggcgccaaatccagcgttgcagaggatcgggcaataactcggctggatcaggccatgctgtgcttggattgtctcactggcgggacaaacagtcgcgtttcaacggtctaatcctttattcggatcatctgtaggattaacctcacttgatcgccccaccgcgatcctcacttggagatcccgcatgaaactgttgcatatcgattccagcattctcggcgacaactcggcgtcccgtcagctcagtgcgggcgtggtcaaggcctggcaagcggctgaagcgggtgtggaagtgacctaccgtgatctggccagcgaaggcatcaaccacttttccggcgcaaccctcggtgccttgggcactgccgctgagctgcgtgatgccgcgcagaagcatgaggctgacctgagcgcttcgtcgctggctgaattcctcgctgccgacgcggtagtggttggcgcaccgatgtacaacttcaccattccgacccagttgaaagcctggatcgaccgtatcgccgtcgccggccagaccttccgctacagcgaagccggccctgaaggcctgtgcggcaacaagaaagtcatcatcgtgtccactgcaggcggcctgcacgccggccaggcatcgggcgcggcccacgaaggctacctgaagctgttgtttggcttcctcggcatcaccgatatcgaaatcgtgcgtgccgaaggcctggcctacggtgatgaagtgcgcagcaagtccctgaacgacgccaacgtagtcatcaacgaacaattgttcgccgccgcgtaaggcttgtgtaaattccgcctttgctcggtttcattctgaagccgggcgcctaaactctgtattctgctcgcctcaaaacgaacggagtacggagttttttcgtttagccgctgtcattactttggcccaggttgtgcaagcatgggtttaacgccctggacttttttcgatatgtttgttctcacgcagcaaaggtggacatccccatgatgcgtctttgtgctgttatggttctttccctgctcggcggcctgatttcagtgcacgccgcacccgcgccgcacccgcattggagtgtgggctttcatcgcatgacgtttctcgatccgctggacctgcaacccatgaaggcgatcgccttctatccctctaccgatctagagcacaccacgcaattaggcgcctatcacgtcgccgccaccgaagattccaagatcgccatcggccgtttcccgatgctgatgctgtcccacggcaacaccggtacgcccctggcactgcatgacctggccacctccctggcgcgcaaaggctttgtggtggtggcggtgctgcacccgggtgacaactacaaggatcacagtcgcctgggcacggtgagcaacctgtacggtcggccgatccagatttccgaagcgatcaccgccacccttggcgacccgatgctgtcgccgttcgtcaacgtcgaccaggtgggtgtcattggttactcagccgggggtgagaccgcgttgatcctggccggcgccaagccggatttcgaccgcctgcgccggtattgccaggagcgtccggaagatcgcgacgcctgcaccaccaagggcgaactggtggtggaccgtgacgacctgcaaccgcaatccgacccgcgcatccatgccctgatgttgatggcgccgctgagcctgatgtttggccgccataccctggccgatgtgcatgtgccggtgctgctctacagtggtgatggcgacaagttggtggcggtggataagaacgccgctgcgctggcgcgcaaactgccggagccaccggacttcaagctgttggccggggcagggcacttcgtgttcatggcgccgtgcgacagtgatcagttggcgacgatgccggcgatttgcaccgatgccgatggggtcgaccgcgaaggcattcaccgcgacctgatctccgaggcggggcggttcttcagtcacaccctcggccaatccacccgcgcaggcttgcagaccgctgatcagtaagcgcggcgcataagcagcagggtcacgcccagggccgtgaccgacaacagtgcggcacagaagaagatccagccgtagccgaggttgagcgccacggcgcccatcaacggcccggcaatcgccagggccaggtcaaaaaacaccgcatacgcgctcagccccgcgccacggctgctgttgggcacctgcttgatcgcttccacacccagcgcggggtacaccagcgacaagccgaagccggtcagcccggcgccgatcaatgccactccagtggacggcgccagccacagcagggtcaggccgagggtttcgatggtcatgcaggcaatggctgcgcggaacccgccgaaacggctgatggcagagataaacaccagtcgcgacaggataaagcacacgccgaataccgtgaggcagtacgccgcgccggcccagccgcgattgaggtagtacagggtgataaaggtagtgagggtgccgtagccaatggacgccaggcacaggctggcgccaaacggcgcaattcgcccgaacacggcccagaacggcaggcgctcgccgcgcaccactggcaccgagggtttattgcggatcagcagcaacccgagtgcggacaatactgtcagtgcgatgccgaggctgttgtagccatattccgcgaccatcaccacgccaagcggtgcgccaatggcgatggcaccgtaggaggcgatgccattccacgagatcgaccgtgcagtgtgttccgcaccgacggcgcccatgcaccaactgatggtgcccacgccgatcaggccttgggccacgcccagcagcagccgcgcaacgatcaggatacccaggctcaacgatggcaggcttgccaccagcgtggcgaagaacgtcagtacgccactcagcagaatcccggccaggcccagcacaatcgcacgcttggtgccgacgttgtcggacatgcgcccggccatggggcggctgagcagcgtcgccaggtactgcgaaccgatggtgatccctgccaccactgcgctgaaacccagttgctcatgcacatagccaggaattaccgcaatcggcaggccgatgcagataaatgcgatgaaggtgtagaagacgatggagacgatctgcagggtgatcgatatcgagctgggggcggcggcaggcatgggcactcgttcgcgggcgggcggtgcgggcatgatggcaagggcgcgggggaaaaggaagctggctaactactttgtctgatgaaccggctttgcgcggtaaacgatgccgttgtggtgagcgggcttgccccgcgttgggctgcgaagcagccccaatagaaaacaccgcgttctgtcagacagagcgcggtgtttttttagggccgcttcgcgccccaacgcggggcaagcccgctcgccacaacaagcccgctcactacaataaatcgagtgctttagaacaccacaccctggctgcgcaggtaatcgtcataggtgccgctgaagtcgatcacgccgtcggcgctcaactcgatgatgcgggtggccagggacgagacgaactcacggtcgtggctgacgaagatcagcgtgcccgggtagttctccagcgccaggttcagcgcttcgatggattccatgtccaagtggttggtcggttcgtccatgatcagtacgttcggcttttgcaggatcagcttgccgaacagcatgcggccttgctcaccaccggaaatcaccttgaccgacttctggatttcgtcgttggagaacagcatgcggcccagggtgccacggatcatttgctcgccttgggtccactggcccatccagtcgaacagggtcacgtcgtcttcgaagtcatgcgcatggtcctgggcgtagtagcccagttccgcggcgtcggtccacttgatgctgccggcgtccggggtcagttcgttgaccagggtgcgcagcagggtggtcttgccgataccgttcgggccgatgatcgccacgcgctcgccggcttcgacctggaagctgaagtccttgaacagcggtttgccgtcgaagcctttggccattttttcgaccatgacggcctggcggtgcagcttcttgttctgctcgaagcggatgaacgggctcacccggctcgatggcttgacttcggccagctggatcttgtcgatcgccttggcacgggaggtggcctgcttggctttcgaggcgttggccgagaagcggctgacgaaggattgcagttcggagatctgcgccttcttcttggcgttgtccgacagcagttgctcgcgggactgggtcgccacggtcatgtactcgtcgtagttgcccgggaacaggcgcagctcgccgtagtccaggtcagccatgtgggtgcacacgctgttcaggaagtgacggtcgtgagagatgatgatcatcaggctggagcgctgggtcaggatgttttccagccagcggatggtgttgatgtccaagtggttggtcggttcgtcgagcaacagcacttcaggatcggagaacagcgcctgggccagcaatacgcgcagtttccagcctggagacacttcgctcatcgggccgaagtgctgttccaggggaatgcccaggcccagcagcagctcaccggcgcgggattcggcggtgtagccgtccatctcggcgaactcggtttccagctcggccacggccatgccgtcttcttcgctcatttccggcagcgagtagatgcggtcgcgctcggccttgaccttccacagctcttcatggcccatgatcacggtgtcgagcacggtgaattcttcgtaggcgaactggtcctggcgcagtttacccaggcgtacgttcggctccagcatgacctggccgccggacgggtcgaggtcgccgccgaggattttcatgaaggtcgacttgccgcaaccgttggcaccgatcaaaccataacggttgccagcgccgaacttgaccgagacattctcgaagagcggcttggcgccgaactgcatggtgatgttagctgtggagatcaattactttacctatcaatgggttgcgagcgtgtcggcaggagccttcaggcatgcgtcaacagcgacatcaaggcgcgaaacccggtcgctgagcagaaaatgggggatgtgtgttggaatttggcgcgcattgtcgcatatgtcaggcgacagttgtatgtccggcgaaggaaggtttcgccagggtctccggcattgccagccataacaacgccaaggccagcgctgcgaccccggccagagtcaggaatgccgcgttgtacccggcctgttgcaccacgaaacccgccaggctgctgctcagtgccgcgcccagaccaaacacggtggaaagggcgcccaggctgacgttgaagcggccggtgccctgggtcaggtccttgacgatcaccgggaacagcgcgccgaagattcccgcgccaatgccgtcgagcatttgcacggccaccagccaataagggtcgctggacaaggtgtagagcacgccgcgcagcggcaggatcatgaaaccggccatcagcagcggtttgcgcccccacaggtcagccttgagcccgaccagccaggccatcggcaccatcaccaactgggcggcgacgatgcacgccgaggtcagtggcgtggccatctgcaggttgatctgcgacagcttctggctgaccagcggcagcatggcggcgttggccaggtgaaacagcgcgcagcagatggcaaacagtagcagcgggcgattcgccagcagcactttcatgccggatggttgttcatggtcggtgtgatgtgccgggtcgaagccgcgggccacttcatggtcgatggcctcggcggacacacagctgatcgcaacgatgctggcgagtgccatgaacgccatcaggtaaaacaccaccactggaccaaacaagtaggccaggccgccggccaacagggcggccacggcattgccggcgtggttgaaggtttcgttgcgtccggtgcggcgggtgaacgcgcgcggcccggtgatccccagggagatcgcggaaatcgccggtgcaaacaccgaggcggcgacggcactggcggcctgggtcaatgccaccaggctgaacgagctgacaaagggcagcagcaggcaactggcggttaccacaatagcggccagcgcgatcaccgcgcgcttgctgcgggtgcggtcgatcaatgcgcccgccgggccttgggtgatcaatgcggcgatacctgccagggtcatgaccacgccaatactggccgggtcccattggtgcacggccagcaggtaaatggccagatagggtccgaggccgtcgcgtacatccgccaggaagaaattcaggctgtcgagggacaaggtgttacgcaggtcggaatgtttggccacggcgagcacttcgcaagcggtgttcaaggactgaacacgcattgcgttagtgacccgcaggcgttgcgttaagtttcgtgcgttagccgggttttattccgtgggtacatggcttattttctgagcccctctgtatggattatctggagacgcaatggacatgccctcagctcaacaggcgattgcctgcaacaaagacgcctgggatcaatcggccggcctgcacaagaccaccgacacctggaacgcgttgctcaatagcgtcggccaagctgacttttcctgcctggatcctacgattaccgggctgctgcaagacgttggcgtggccggcaaagatgtggtgcaactgtgctgcaacaatggccgcgaaagcctgtcgctgtttggcctgggcgcacgttcggtggtgggcgtggaccaatccccggcgttcctccagcaggcctgggagctggccgatgtctcgccgcacaaccctgagtttatcgagagtgacatccatcatctgccgcaggcgttacacgggcgctttgacatcgccctggtgacaattggggtgctgggctggatgccggacgtggcgctgttcatgcagcaggtcgccctcaccctgaaacccggcggcaccttggtcatgtatgaaacccacccgtttctggaggtgttcgatccacgggcgccaaacccgttcctgccggccagttcctacttccagcacgaacccttcgtactgcaggagtcgattgtctatgaggggcagggcgaggtggccgggccgacgtcctattggtatgtgcacaccctgggcgatgtggtcagtgccgcgattggcgcccagttgcagatcgttcacctgcaggagtatccccactccaaccgcgaagaactctacgaccaatacgagcaccagcccgcacaattaccgatgtgctttaccttgaccgctaccaagcgtctcgactgaggcgtctttcagtcgcggcgcacgaacgtgcgcatggtttgcccagggcctgtgctgaacgtggttggcctgggcataccttcgtcggcggcaatgaacacaaattcatcaccgtcgaggcgataactggcgggcaagtgtttgccggcgtcatctcccatggagtcgatccaggtaatgcgcttgggcactgtgctgctgtcgaggaaaaaacgtcctgccagcaatacctcgccgctgaccgtcttcacttcgaagccgtcgccgctgatcgtggtgattgcgccaggggccgtgtgcgcgtcgatggggttgagcacgccgctgtcttcgagtgaggtttgctcccacgcaccttgcagggcttgaaagtctgggtctgaaagggatgacatacaaattcctttttgttgaaggggaaatcgtcgatggcgatgccttttatcatttgaagctggattacgcagcacattcgcaagacagcttttcacaattcttagttaacttttggttacaacctgtggctaaataactgcaaagggccacgcgccgggtggtcactcagccggtcgtgccgattgtgtgaattgtgatttcaggtgctgctatccatcctcgtccgttgtgggcacgcaggagcagcctgttctcttctgacttgtgacgaaatcccttgaaactcatcattgttgttctctacgttgcctcgattgcgtatgtacacttacgtggccgggtgcggcataagctgggccgccaactcagcgatcattcgaccttcctggcgccgatcaactgctttctctatctcttctctaaactacccagccgaccctacctgtcgcccaacgatttccctgacctgagcccgctccaggaacattgggaagagatccgcgaggaaggccagaacctgctgcgcgccggcgaaatcaagcgctcggagcagtacaacgacgtgggtttcaactcgttcttcaagtcgggctggaagcgtttctacctgaagtggtatggcgacagccacccgtcggcgatgaagctatgcccgcgtactaccgaactggtgcagagtatcggttcgatcaaggccgcgatgttcgccgaactgccgccgggctccaagctggtgcgccaccgcgacccgtatgccggctcgtatcgctatcacctgggcctggacacgccgaacgacccgggctgctacatcaacgtggacggcgagaactactactggcgtgatggcgagccggtgatgtttgacgagacctacatccacttcgccgaaaacaccacgcagcagaaccgcatcattctgttctgcgatatcgagcgcccgatgaaataccgttgggccgcggcgttcaatcgctggttcagccgcaacgtgatggcggccgcgggctcgcccaacgatgccggcgacaagaccggcggcctcaaccgcgccttcacccggctgtacaagattcgcttgcgcggtaaagagctgaaaaagcgcaaccgtacgcgttactacctggaaaaatgggcgatcttcgcaaccctggcggcgatcttcctgctcatctgagtgtttcgggcgccattcactccagtggatgagcgcccagtttgtcccacatcttcttgctgattttctgtcgattggcatagccgtcccagggatcgcccttcaagccatccaggcgctgctgcaggttggcgaccgtccattgctgtgcactgcgcaaccccttcaattcctcacgactgaccggcaccgacaccggcaaacccgggcgtgcccgcacagagtaggcggccacggtgctggcgccccgcgcattacgcaggtagtcgatgaagatcttgccgacccggtttttcggtcctgacgtcgcggtgaagcgttcaggcagttgctcggtcatgaattgggcaatcgctttggcgaacgccttgacggtgtcccagttgtctcggcgcgccagcggcacgaccaggtgcaggcctttgccaccactggttttgacgaaggcttgcaagcccagctcgtccaagaccgagagggtgagctgcgccgcttccagcatggttttccagggcagcgccggatcagggtcgaggtcgagtacaaataggtccggggtttcgatcttgtcggcggtggcgccccaggtatgaaactccacggtgcccatctgcaccgccccgagcaacgctttggcactgtcgacttccatcaggcgcgcgtggccagggtcgagcgcctgatccagctgcttgatgttgggaatggccaggcgctccgaatgtttctggaagaactgctctccctcgatgccttcaggcgccctcagcagtgacacgggacggtggcgcaggaacggcaggagccactcgctgatgccgttgtagaactgcgccagttgctctttctgtgtgccgctctgctggtcgatcacgcggtctgggtgggtgatttttacgctgccggtgttttttttggcaggcttcatggatttgctcgtgcgcggttgctcatgaatgatctgcgcggccggcttgtcgctgcgcattgcgacgaacgccgcctggcgcaccacgcctccacgggtccattcggcaaactgcacttcaccgaccaaggtcggctccacccagtgcacgccacgggcctgggcactggtcagcggtttccccagcggcgatgacgtgcgctccaatggcgtgagttgcgcatggatcgccttcagtgatgcttgatcaaatccggtgcccacgcgtccggcatacaccaatcccgacgcttcattgaccgccagcaacagcgcaccgaaaccactgcgcgaaccctgcggccgggtgtagccgacgatcacgaattcctggcgcaggcggcatttgagcttgatccaatcggcgttgcgactggacacataagggctgcccaggcgcttgccgatcacgccctcaagggccaggtcacaggcgctttcaaaaatgtcccggtgatgggcggtaaaggcttcggagaatcgtaatagcttgcttctgctgccagccaacgcagtctttagcgccgcacgccgatcctcgacgggggcctcgcgctgatcctggccatccaggaatggcgcatcgaacaggtagtagacaatgtccaggctgcgcccgatatcgaaggcgttttgcagcgcctggaagtccggcaggccgtcgccgttcaggctgactacttcgccgtcgagccagctgtcgttgagcttcaaagcttgcaaggccttggtctggcgcggcaggcggtcggtccagtcgtggccgttgcgcgtgaacagccgcacctcgccgtcgcggatgcgcgcgagcatgcggtaaccgtcgaacttgatttcgtactgccaatcgccctcgggcgcgcgatccaccagggtggccaattgcggggtgaaatgctcgggaagggtcgccttggtttttcggggttttgcgcgaggcttgggtttacccaccgaggcggcgctgagcacgctgtccggctgggcctggacaatatcgtagtcttcggcggggcgtgcctgcgcgtcctgttccttgatcagcagccattgctccttatcgccgctgcccttcaggcgtgtgcgtaccaatgcccaatcgcccgaaagtttttcgccgaccagggtgaacttgagcttgccggcggcgtaggctttgcgcggatcgtcatggggttgccacacgccacggtcccacacaatgacctcacccgcgccgtactggcctgccgggatattgccttcgaagctgccgtagtcgagggggtgagcttcgacatgcacagccaggcgcttctgtgcagggtccaggctcgggcctttgggcactgcccaactgagcagcacaccatccagctccaggcgaaagtcatagtgcaggttgcgcgcggcatgtttctggatcacgaaggacagcgccgacgccttgcgtttacctgcgggcgcactgcctgccggttcacccgtaatgccgaaatcgcgcttgcggttgtattcgctgaggggcttgggcatgacttatgaggccttggtggatttcttcgcggcgggcttcttggcgggtttgccggccaggctgcgcttgagcagttccgtcaggtcgatcacgtcggcggacttgcgctcttcactgtcttggcgggtttccacatcttcgatcttgccggccttggccttcttggccaccagcgccatgattttttcctggaagctgtcgcggtaatcatcgggttgccagtcggcgctcatgtcgtcgaccaggcgcttggccatgtccagctcacccttggccagggtaggtttagtcacgtcgctgcccagttccagttcgtccaggctgcgcacttcggccggccagcgcagcatcaccaataccagcgccgactccaatggcatgagtgccgccaggtgctgcttggtgtgcaggaccacgttggccagcgcgacttttttggtcttgctcagcgtttcccgcagcagcgcgtagaccttgccaccgcgcttgtccggtgccaggaagtagggcgtgtcgatattctgcagcgggatctggtcactggcgacaaacgcgatgatctcaatggtctgggtcgacttggggtgggccgaacggatttcctcttcgctgagcaccacgtagcggcctttcttgaaggcgacacccttgacgatattgtctttagtgacttccttgccggtggtcttgttgatgcgcttgtagccgacccggtccatgctgcgcttgtccagccagtcgaagtcaacgccctgcgatgacgtggccgagaccagcgacaccgggatatgcaccaggccaaagctgatggcgcctttccagatggctcgtggcatagctgcgattccttgagtagaggctgtgtgcggatgactcggcgccggtgtggaaagtttccccaggcggatgcgcggacagatcgtgttacacctgatgagaaagtatttagtgtcgaaaggcgaaccctgggcgtagcgtgttatcgaaagcacgtactcctcactcccgagaggctttgtcaatgaacacttgtatgcgtcacgttgcagcgctgctgttgggcctggccctggttcccgtggtccaggcgcaaaacctgcccggcagcaacaacgccaacaacggcccgatccaccgggccaaccccaacagcatgcagggcacccagcccaacgcgccggccattcgcgggattcagaccgggccgaccacccgcacgccgaccctggaaaacggcggcattggcaacagctatcccaagcgcgacgccgcccccagccgcccggccaccgaaaccaaagcccccacttatgatgccaacggcaatcgccggtaaggattccgtcttatgtttctacgcaaaaccctgctagccgcgctgtgcgcaacctcgctgttgccgttgacggccacttttgcaactgatgcccagcagttccccagcgaacaaggcagtctctccgtcacgccgatcgccaaaggcctggaccacccctgggccgtggcctttctgccggataaacaaggtttcctggtcaccgagcggcctggtcacctgcgctttgtcagccccgacggcaaactttccgcgcccctgaccggcgtgcctgaagtgtgggccaaagggcagggcggtttactcgacgtggtgctgtcgccggacttcaagcaggaccgcatggtctacctttcctacgccgaaggtggtggcaaaggcggaaccgccggtactgcggtagggcgtggacgtctggcggctgacctgagtggcttgactgactttaaagtgatcttgcgccaggagccgaagctgtccaccggcaaccactttggttcacgcctggcgttcgaccgcgacggttatctgttcgtgactctgggcgaaaacaacgaccgcccgactgcccaggacctggacaaattgcagggcaaggtggtgcgcatctaccccgacggccgcgtgccggatgacaaccccttcgtcggccagcccggcgtgcgcccggagatctggtcctacggccagcgcaacccccagggtctggcgttgaacccctggagtggcacgatctgggagaacgaacatgggccacgcgggggtgatgagatcaatatcatcgagcgcggcaagaattacggctggccgttggcgacccacggcatcaattactccatggcaccgattcccgaagccaaaggcaagaccgcagaaggcaccgtgccgccccatcatgtgtgggaaaaatcaccgggtatcagcggcatggcattctacgatgcagaccgcttcaaatcttggcagcacaacgtgttcatcggcgcgctggccagccaggagctgatccgcttgcagttcgacggtgacaaggtgattcacgaggagcgtttgctgggcggtttgaaagcgcggattcgcgatgtacggcaggggccggatggctttttgtatgtgctgacggatgaggataatggcgtgctataccgagtcggcctcaatcaggactgaagccgacgacaacctgtaggcgcccggcttgccggcgatggcgatttgagcaacgccatcgccggcaaggtttacaggcccaggtcagacagccccggatgatcatccgggcgccgtcccagcggccagtggaatttgcgctcgctttccttgatcggcatgtcgttgatgcaggcaaaacgattggccatcaggccgttctcgtcgaattcccagttctcgtttccataggaacggaaccagttgcccgaatcgtcgtgccactcataggcataccgcacggcaatgcgattgtcggtaaacgcccacagctccttgatcagccgataatccagctccttggcccatttacgggtcaggaaacccttggcctcttcgcggttatgggcgaactcggcgcggttacgccactgcgtgtcgagggtgtaggccagggacactcgatgtgggtcgcgggagttccagccgtcttcggccaaacgcactttttcgatggccgatgcgcgggtaaacggcggcaggggcggacgtgtttctgcagtcgatgacatggggcagttcctcaaacaatcagggtgggttgaaagttgcgccgttgtgcgatcaaagtcccaacaaggtttgcgccatgcattgcgcattatcggcagctgttgaatcgcccatcaccagggcaacggtaatggcgccatcgaccaggatcagcaggtgcgcggcctgccgttcagggtcgggggtgccatgtgcttgacacagttcgagcaggtactcgaacagtttctgtttgtgggccttggccaactggcgcaccgggtcctgcgggtcgccggtttcgccgctggtgttgatgaaggcacagccacggaaatcggcggagccaaaccaggttttcagtgcatcgaacaccgccagcaggcgctcgccggtgccttcgctgcgttccacctctgtgcgcagccacagcatccagcgctcgtcgcgccgctgcagggcggcaatcaccaaatcgtctttattggcgaagtagcggtagatgctttttcgcgagacgccggcggttttcaccaggaagtccatgccggtggcggcgatgccgtggcgatagatcaacttttcggtgacgtcgaggatgatgtcgcgggtttcattatgggtcatgtcgttcatgttgcgaacagtagaacgatcgttcttcttggtcaattaaaatttttccatgcgccacggcaagacctgaggccccccatggtgtaagctcggggcctcttcggattcgacccattgcgagccttatgccgtcgttcttcaaacgctccctgttgcccaaactgcgcggttttcccctcactcctgatgcgattgacgtgctgtgcggcgccgctgcctatcgccgctgcctgctggagaaaatcccccaggccacccggcgcatctacatcgtcgcgctgtacttgcagcaggacgaggcggggcaggagatctacgacgccctgcacgccgccaaggcagcgcgaccggagttggacatcgtggtggtggtcgactggctgcgcgcccagcgtggcttgatcggcgccggcaagcagccgggcaacagtgcctggtaccaggccatgacccagggccacagcagtgaagtgccggtgtatggcgtgccggtgcaaacccgcgagttgttcggcgtgctgcacctcaagggctttgtgatcgacgatacggtgctgtacagcggcgcgagcctgaacaacgtgtacctgcacaagttcgacaaataccgctacgaccgctaccacctgatccacagccaaccgctcgccgactccatgcagcatctggtggagcacggcctggtggcctccaaggcggtgcatcgcctcgacctgcccaacccgcccagcacccgcagcctgcgcaacgacattggcgacctgcgcagccgtctcaagcacgcgacatacgacaccaccaccgggcaattgcccaacggccatctgtcggtcagcccgctgctgggcgtgggcaagaacaatccgttgagccgggtgatcctggagctgatcgccagcgcccagcatcaactgaccatctgcactccgtacttcaacctgccgctgccagtgacccgcgaaatcaaccgcgccctggcgcgtggggtaaagatcgacatcattgtcggcgacaagaccgccaacgacttctacatcccgcccagcgaaccgttcaaggtgatcgccgcgctgccgtacctgtacgagatcagcctgcgccgtttcgccaagcgccatcagcgcgacatcgaccacggccagttgaacctgcacctgtggcaccacgacgacaacacctaccacctcaagggcatgtgggtcgaccagcgctacaccttgctcaccggcaacaacctcaacccgcgcgcgttccgcctcgacctggaaaacgccttgctgatcgatgatcccaagagcgagtggctggagccaaggcgtaccgagctggcacagattttccagcacaccacgcgtatcgaacggtatcaggacttgcagacgctgcctgattatcccgaggcggtcggcaagttcctgcgccgggtcagccgggtacgaatcgagcggttgttgtatcggatcctgtaaaacccgcaggcaaaaaaagacccagccccttcaacagggctgggtctttttttgtgctgcttagttcaggcccagcttaccccgcaaggtggacaggtcttccgccagggtattgaccggacccaccagggccttgcggtcgttttccttgaccttgtcataggtttcgaaaccgccatccttggtcttgtacttggcgaggatcttgtccacgctggcgaaattcttgtcgaccttggccaggaaggccttgtcttgcttctcgatctgcccacggaacaggtcgacgattttcttcgcgccgtcgatgttgccctggaagtcatacaggtcggtgtggctgtagcggtcttcttcgccggagatcttggtggcggcgacttcttccagcagcgctgcggcaccgcctacgactttctcgggcgggaaggtcaggccgtcgacgcgggtcttgaggtcgttgacgtcggtgttgagcttggcggtcagcgcttccaggcccttggtggtgttctgcgagaacagcgcgtattcgatacggtggaagccggtgaagtcttcggcggtcacgcctttttcgtggtcgtcgacacgggagtcgatggacgcatcgaggtcgctgaacagctcggcgatgggctcgatggactcatagtgcacgcgggtcggcgcatagagcttcttggcggtggccaggtcgcccttgttgatggcgtcggtgaacgcctgggtctgggtgaccagctcaccgatttcctcggtgacgtagatcttgtagtccgacaccggccctaccaggtccagcggcgcggtggcggcgaaggctgccagcggcgaaagggtcagcaacaacgacaacgcaatagtcgacttcttcatgggacggtatccgctctgagtgtgtttttaggtattggcagtggtttgagggtgcgttgcagcaagcagcgtgcgcccgatgaaatcctgggccccggtgacgcctggcaaggtgaagaaatacccgccgccgaccggcttgaggtattcctccagcggctcgccgttgagccgggtttgcacgctgataaagcctttctccaggtcagcctggtagcagatgaacaacagccccatgtccagctgaccgttcttgttgacgccgttggagtagttgaacggccgacgcaggatcaggttggcctgggtctgcggggtgcgcgggttggccaggcggatgtgggcatcgagcttggtcagtttgccttccgggtccttgctgtagtcgggcacttgggtttcgttgtggccatccatgggcgcaccggtgggcttgacccggccgatgatgctttcctgctcctgcaacggagtgcggtcccagcgttcgacgaagttgcggatgatgcgcacggcctgatagctgccgttggcggcccaggccggttcgtcgctgccgggctgcacccacacaatctgattcatggccttggcgtcgttggagttcgggttggccgaaccgtcacggaagccgaggaagttacgcgcgctctgggccggctcgccgggcttggcaggcgcctggggcggtacgctgccttcctgcttccagcgcaccagcagcaggtcgggcaggtttttcacgatgtcgcgcaaggcgtggatattggtgtccggggtgttggagctgaattgcaggctcaggtcgccgtggcattgcgccggctccagcgcatcgttggggaacccgaccatgcggctcaggcgcttgggtttgactgccgtgaggccaaagcgctcatcgaacagcgattcgccgacggacacggtgatggtgaggttgtccggggtgaccaccgggccgaggatgccggagtcggtgggcggcagtttcgggtcgacctgcggcacggtgccgccggtcatgagaaaggcgatgcgttcgttcagcgtacggaacaggcgctccaggtcgtcacggtcgctggctagtacgtcgaacgcaacaatcatgccgcaggccgggcgtggggtgacgataccgctctggtgtttgccgaagaaatcgtggtggtcctgggtcttgtcactgcgcggcgcggtggtgacttgctcggccgcagcggccatggccgggcaggtcagggcgctgccggcaatcgcggcaccggtggcggccatgcccagcaggacacggcgacgctgaaggttggtgtgttctgaatcactcatgtgtgcggtcgtcttcactgcaggccggaaaggccaagggcggggtcgattccatcgagtgcaacggccagagccttggccttgccggcgatctgcttacgctgatcggcggttacggtgtcgtaggtggcgtagcccttgtcgaccttgaagccttgcagttcggcatcaaaggcggcgagggcgctgtcgattccaggcaacaggtcggcggcggatttggtcagcagcgggcgcatcaactcgaccaccttgtgggcggcctccaggttggcggcgaaaccattcaggtcgacgtggctgtagcgttcttcttcaccgctgatggcgcgtacatcggccaggctgttgaggttgcgcaccacgatgctgaccaactgctccggcggcagggactgggccagcaattgttgtttgagggcgctgacgtcggtcagcaggcgctgggcaaccggcgccagcccgtcaaggctgcgttgctggaacagactgtattccaggcggtggaagccgctgaaggccgggtcctgttcgcgtttttcaaaatagtcggcacgggcgttgatcgcgttgtccagttgcgcgaggcgttgcgatgccggggccaggcgttggtaagcctcccgggccggtacgtagagcgcttgggcctgggccaggtcgccatggtcgatggcctgttgcaacgcgctgaccgccttgaccagtgcgctgccttggccgctcaagtacacgcggaattccgacaatgggccaatgaacgccaccatcgacggtttggccttggcctgggcgtcggactcggcagtcggtgttacgtgcaaggtgccacgcgggttgctcagcaggccacaggtgatcgcgtagtcaccgggcaacaggttggcgttgatcacctggctaagcccgggggcgatgttttcccgttcttcgaccaccagcacgccgtccaggatctcccattccaccgcacgatcggagcggttgatgatgcggaagctggcgcggccggcggggaccgtcaattcattcggttcgcaggcgtgaccatgaatgatcacggcgatttcattttggttggcctggcgcttgctggcggccagctgtgaggcgtaatagaacaggccaccggcggcgatcatcacgaccaccgagcccgccacagcccagcgcagggcgcgaggtggcgaaggcggttgaggggttgggttggacaagagacggtccttactgactggaagcggaagagggtgtgatggcctgcttgggtggcgcggcgggcaggaagaacatcaccagcgccaccaccaggtaaatcaggtaggcgccgagggtgctgacggtgggcgcttcctgatagccgaacatgccggcgagaaccgaacccagcgggctgtccatgggcagggcggcgctgaagtcgaagagcacggtttgcaggtgattccacacgcccgcttcgtgcagggcctgtaccgaattggcgaggatgccggcggccaccaccaggatgaacaagccggtccagcggaaaaacgcaccgaggttcaggcgcatgctgccggtgtagatcaggaaaccgacgatgatcgccaggatcaggccgagcagggcgccaatcggtgcgccggggccttcgctctgctggaacaccgccagcaggaaaaacacggtttccaggccttcacgggccacggcgaaaaacaccatgaggatcagcgcagtgacttggtgtttggacccggccaacgcgtgatcgagggattcgtgcagggagtgcttgatggaacgcgccactttacgcatccagaacaccatggaactgaggatgcccacggcgaccaggccaacgatgccttcgaacagctcctgctgcttttgcgggaactcggcgctgaccagctccagcccaccacctaccagcagggccagtgcggcggcgagaaacacgccgatccacaccgcaggcatccactggccacggccggtctgttgcaggtaactggcgataatgccgacgatcaatgcggcttcaatgccttcgcgcagcatgatgagaaaaggaacgagcattcggcaccgcgtcacaactagataggaggctaagttgtaacataatgatactcattactaaacaggcaatcttgacaatagctgaaccctacctgaacggtggtggcaaaacgcatcccaccttatgatgcgtgccattatttgcgccgccggatgcccgtttcgccatgtcggaaaaagacaccatctccctccacctcgtgcgcgaagccttgctgcaaagctgcgcgcccggcgcggccagtgccgaagtgctgcataaagccgggattgacccggcactgctggccgagcccaacgcgcgggtctcggccactacctacgcacgcctgtggcgcctgctggcgcgacgcatggatgatgagttcttcggcatggacccgcgcaagctcaagtccggcagcctggcgtttctctgccgcgccgcgatggcgcaacccaccctgggcaccgggctggaaaccggcttggggtttctgtcgctgatgctggagcgcctgcccgccgagttggtgcgtcaacaaagcctggcggagatcgtattgctggagctcgagtccgaacccaatcgggccttcacatactttacctattggatgatcgtgcacggtgtggcctgttggctggccgggcggcggatcccaatcctggcgattgagctgcgctgctcaaaaccggatttctgtgatgactaccaggtgatgttctccgacaacctgcgtttcaaccggccccgcacccgcatgatcttctccgccgactgcctggacctgccgatcaagcgcagcccggaggagctcaagcgcttcctggcccacgcgccggccaacatcctggtcaaataccgcgaccccgccagcctcgccacccgcatcaagcacgacctgcgccagatgcctcctgacacctggccggaaactgacggcctcgccgccagcctgtgcatttccgcctcgaccctgcgtcggcggctggcggaagaagggcagacctatcaggggctcaaggacagtgtgcgcaaggagttggcgattgtgtggttggcggagccgcagatcagctttgccgaaattgccgagcgactgggctttgccgatgcaagttcgttttataaggcgtttcgtaaatgggtggggtcgaacccggggcattatcgaagtttgattctgaatgaaacaaacaagcggtaacggtgtggatgtgcgggattaggaaataacttacccgcttcttctttcggatgacagaacggtccttcgctattttaggaagtgctcggcttgccgccatttcttcttcgtgcatagttatcctcacggtacctgaatacgcctattggacgattcgattaatgtgctgcgcttacccgcgacggcgggtgtgcgctgctgaatcgagggcagcctatgcgcaaataaaaacagaacgattacatgaacaccaacaatcttaatggcttgaggtggaaatcatgaaaagtagttttgcgttggtttttgcgggattgatgttgatgtcggcgcaggcgtcggcgttgtgtacctatattacggagagctacggcggcactattccgccgaaaacggcgatacctgccaaagggccttttgagaacacctccgttaatggctgtttgaacgccagtattgatgccatcgtaacagccaccggtgcagggaacaccccggagatctatatcgaaggcgaggtgggaggtggatcatggcgacggttgacgttcagtatcggcagcaacgcttcttgggtaggtccgttcggtaagtacagggtggtggtgtataacgacgactcggtaccaaaagtctactcgggaagtgtcaggtacggtcgttgaaaccgaacctatgcagtgtgccggaagttatccggcacacggccttctgtgaggtaaattcagaaatcatgcacgctcgtcaattgataaatcgtcatttgacgagtttgcgaaataggccaatgcggcgagcgcgtgattcgctgccaccagtcctctcataaaatctgaagcaccctcctgatgtgctacatatggattgcttttgaaaaagtctatatatccctccagctgctcgttaaataacgcgacggcattgaatttgacatgggtctctgcaggaagtccgtttgcatcaaacgctccgtttcctacgacgaacagccaataagcgcgggaatcaataatgcctttgtcgtagagttcgctacctacttttttcaggtcgttactgctgatcgacgtcatgtcgtggcccttcagaaaactcttcaattcactgatttgctcctgctgccaaaacttcagtgtctctgccgcttctgcttcttcagtcttagtgaatgcgttcacgacttgttcaggatttttgatggtgtaaccaggggttgccattgagttctgcacttgacctgtcgctgataaggtaaccataaaaagcctcaagtagttggggttacatctggttgtcgacaagttggtgagtttcttaagtgctgaaaatgtttcgtattggggtggcgttattgtcagtgttgagcggttgtgtgggattgtgcaggtgggcatggtattaggagtgtttgcatgtggactaccttcatgtctgacagaactgtctggcgatgttttagataagtcctgaaccgcctgacttgtctcaagggactacagaaaggtccttcgctattttaggaagtgctcggcttgccgctgtttatttttcatgcatagttatcctcacggtacctgaatacttctattggaagattcgatcaatgtgcttcgcttacccgcgacggcgggtgtgcgctgctgaatcgagggcagcctatgcgcaaataaaaatagaacgattacatgaacaccaacaatcttaatggcttgaggtggaaatcatgaaaattagttttgcattggtttttgcgggattgatgttgatgtcggcgcaggcgtcggcgttgtgtacctatattactgacagctatggcggtattatcccgccggaaacgaccgtcacagcaaaagggccatttgaaatcaccccttcgaacggctgcttgaatgccaacattgaggcgatggtaacgcccacaggagctggcaaaacgcccgagatctttattgaaggcgatgtgggtggcggatcatggcagcggttgacctacagtatcggcagtaacgcgttttgggtggggccgtttggcacctatagagtgcgggtatataacgacggtccagtaccgaaagtctattcaggcacggtcagatacggtcgctgaaaccgaagggatgcagcgtgccaagtgatcttcggcacactgcatccgtcaactctgaaatcagacgcgctcgtccaccgacaatttatcgtttgaagaattggcaaagtaggacagggcagcgagcgcatgattagcggttaccagccctttcataaaatccgatgccccttcctgacgcgctatgtagggattgcttttgaacaagtcaatatacccctccaacttttcgttgaataaggcaattgcattgaatttaacatgggtgtctgctgggaaaccgtacgcatcaactgctccgctcccttccacaaatagccaaaaagcacgtgaatcaatgagacctttacgataaagctggcttccgattttcttgaggtcgtcactgctgatcgatgtcatgtcatagtccttcagggcgttcttcaactcgctgatgtcctcctgctgcacaagttttaaagtttctgtagcctccgcttcttcggtgatggtgaattgattgacaacttgcccagggtttttgatggggtgggctggagtggccattgaattcggtacttggcttgtcgttggtaaagtgaccatgaacagtcctctgttaatcgggcctacatctggttgtcgacaagttggtgagtttcttaagtgctgaaattgttacgtttgaggttggcgttatcgccagatttaggcggtggcgtgggcttctgccggcagggcgtgatattaggaattttcacgcgttggactacttcgagatctgacagaacggtctttcatgtttttgggaagtggccggctttcctcttgcgatcattcaggcatagttaatagcacgcagcctactgaagggttcgatctatgtgcagcatgtcaccgtgacgaccggtgcgtactgccaaatcgagggcgatatatgaaaaaacaaaaagattgctgatgagtgttcgcaaaaacttaataggattaacacttgaggtgaaaatcatgaaaagttttctcgcattaccttatttagtgctgatgttgatgtctgctcaggcgtcggctttgtgtttgactcttacggatagctacagcggaataattcagcctgactccagggcggtagcactgggtccgttcaccatctcgggagctaacggctgctcgaacgcaaatatcgacgcaatggtatctgcagcaggcggaggtagaccgcctcagatatacatcgagcagcaggtgggaggggcttggaaaaccgtggccggtaaccctttgtcagcctacgcctcatggctcgggtcattggggacctatcgggtgatattggataaccccgaagcggtctccaagtcgtattggggaacggtcagatttggccggtaatgccctgatagaaccgggtgccaagggttcggttggcacccggtgtcgaaagaacccgcttcaagcacgttcctctatagaaagatcacttcgggaggagttaacaaaaaacgccagcgcattgatagcgtgattggcggcaaacatcccttgaatgtattcagggatgccttgcgagcgctgcacgtcaggacgcccctcaacaaatgacaggtaatcctcaaggacttcatcgaacaaagcgattgcgttgtactttacatcggtttcagcgggctggccgttttcatcaaaggcgccgaggcctgttatgaacatacgaaagccctggccatcaatgacgccactttcataaagccgccttccaacgacttttagctcattggtggtaatagacgtcatatcgtaatctttcaaaaacgctttcagatcatcaatcgactgttgattacccagtttcaacgtgtccgacgctttcgacgcgtctgttatcgtgaatttattcaccacctgttccgggtgctttatctgaaacggattagacgccttcgtgtgcctcatttgctccgcagtcaacaaaacggccatagtgaaattctccatcagccgaaagctacatctttgtatcgaccttccttgaacccactttaaaaaaagccccgtgaccgaatggaccacggggcaaaaaattggctggatgcgaccaaccaaaggagctctttacctcacttggcgctggcgaccaccgtgtccggctgccagccaccgcccaacgctttgtagatcgcgacgatgccgcgatacaggtccacttcggcctgggcctgggagtcttcggcggccaggcgctcacgttgcgcgtccagcagcaccaggaagtccacggtgccttcgcggtagcggatcgcggccaggtcggcggcggcacggctggattcgctttggcggatcagcgaaaccaggcgttgctgacgcttgccgtagtcactgaaggcgttctcggactcttccaacgccagcagcacttgctgctcgtaggtcgccagggcgccatccgcttcggcatcggcgccgcgcaaacgggcgcgcacgctgcccaggtcgaaggcggcccaggtgatgctcgggccgagggcccaggcattcgcggcggacgagccgatctgggaaccgcgcccggcggtaaagccgaggaagccgctgaggctgacccgtgggaacaggtcggccttggccacgccgatacgcgcagtggcggcggccagtttgcgttcggcgctgaggatgtccgggcgacgttgcagcagttgcccggggtcgccaatcggcaaggccttggcaattgccggcaagtctttggggctcaggtcgacgctgagcttgtcggggcgctggccgaggagggtagcgatacggttacgctcgcgcacttgttcggcttgcagttgcggcacgctggcttcaaccgctgcgaggcgtgcgtcggcacgctccacgtcgagttgatcgcccacaccggcatcgcgcaggctgacggtgatggtgcgcgattcctgctggttcttcaggttgtccagggcgatgcgttcacgcagttgcgcgccacgcaattggccgtaggcgtccaccagttcggcgatcattgtcacttgcagctggtacaagtccgcctcggcagcctgctggtcagcgtcggtggcttccagattgcgctggatgcgaccgaacaggtccagttcccaggccatgtccaggcctaggtcgtaacgctcggtcttgacccggctggtggtctggcccggaatctggcctttgccctgatcactgctgactcggctggtgatggtcggcatcgcgtcgttgctggcgtcatcacggatcgcccgcgccgcccgcaggcgggcaaaggcgacgcgcaggtcacggttgccttgcagcgattgcgtcaccaactggttgagggtcgggtcgtcgaactgctgccaccagatgccttcgaacttggcatggtcatattgcttggcatcggcagcggccgtgatgttggccgcctccggggtctgggtcttgtagtcggggcctacggcacaggcgctcagcgccagtaccagcaagctcggcaggaatactttcacactcattgctgtgtctccagcttcaaggccttggccgctttgcgtgcctcgctgcgctccaccgagcgacggatcagtacgtagaacactggcgtcagcaacagaccgaagaaggtcacaccgatcatcccggagaacaccgccacgcccatggcatgccgcatctcggcaccggcgccgctggacaacaccagtggcactacacccatgatgaaggcgaacgaagtcatcaggatcggccgcagacgcagacggcaggcttccagcaccgcagcgagcgggtcgaggccttctgcctgtttgtccttggcgaactcgacgatgaggatcgcgttcttgcacgccaggcccaccagtacgatcaagccgatctgggtgaagatgttgttgtcaccgcccgagataatcaccccggtaatcgccgacagcagggtcatcggtacgatcaggatcaccgccaacggcaggctccagctttcgtattgggcggccagtaccaggaacgccagcagtacgcagagcgggaacacgaacagcgcagtgttgcccgagaggatttgctgatacgtcaggtcggtccactcgtaggtcatgccgttgggcagttcgtctttcagcagtttctcgatcgccgcctgagcctggcccgagctgtagcccggagcagcgttgccgttgatttcagcagtgataaagccgttgtagtgcatcacgcggtccgggcccgaggtgtcgctgaccttgatgaaggtcgccagcgggatcatctcgcctttgttgttgcgcactttcagctgaccgatctggtcttcatccaggcggaactgttgctcggcctgcacgttgacctggtaggtccggccaaagcggttgaagtcgttggcatacaacgaacccaggtagatctgcagggtatcgaagatgtcgctgatcgccacgccgtgggtcttggccttttcacggtcgatggcggcatcgacctggggcacgttgaccgtgtagctggtgaacaggccgaacagttccggcgtggtacggctcttggtgatgatgttctgcacttctttgtacagctcgtcgtaccccaggttgccccggtcttcgatctgcaggcggaagccgccgatcgtacccaggccctgtaccggcggcggtgggaagatcgccatgtaggcttcctggatgctgctgtacttgccgttcaaggcaccggcaatcgcgccggcggacatgctcgggtctttacgctcgtcgaacggtttcaaggtcacgaacacgatgccgctgttcgggctgttggtgaaaccgttgatcgacaggcccgggaacgccacggcggcttccacacctggttgtttcagggcgatgtcggacatgcgcttgatcacgtcttcggtgcggtccaggctcgccgcgtccggcaattgagcgaaggctaccaggtattgcttgtcctgggccggtacgaaaccggtcggcgtgtgggcaaagcccagccaggtcaggaccatcaggccggcgtacaggaacagcgcaataccactgccacggatcacccggcgcacggtgccgacgtaaccatggctggccttgtcgaagaagcggttgaacggtttgaacaaccagccacccagcagcttgtcgaggaacttggagaagccatccttcggcgcgttgtggcttttgagcagcaccgccgccagggcaggggacaaggttagggagttgaaggccgaaatcaccgtcgagatcgcaatggtcaaggcgaactgcttgtagaactgcccggtcaagccgctgatgaacgcagctggcacgaacaccgcacacagcaccaacgcggtggcgatgatcgggccggtcacttcgctcatggctttttcagtggccgggaaggggtccaggcccagctcgatgttccgttcgacgttttccaccaccacgatggcgtcatccaccacgataccgatggccaataccaggccgaacaacgacagcgcgttgagcgagaaaccgaacaggtgcattaccgcaaacgtaccgatcaacgataccggcaccgccaccaacggaatgatcgaggcgcgccaggtctgcaggaacaggatcaccaccagcacaaccaggatcagcgcttcgaacagggtgtgtaccaccgcttcgatggagccgcgcacgaagatggtcgggtcatagacgatgctgtagtccatgccttgcgggaagctctttttcagctcttccatcttgccgcgcacttcgttggagatctcgatggcgttggagccagggcgctggaagatcgggatggccacggccggctggttgttgagcaacgagcgcagggcgtattggctggaacccagctccacccgagcgatgtctttcaaacgcgtgatttcaccgttggcgccggagcgaatgatgatgttctcgaactcttcctcggtcaccaggcgaccctgggtgttcaccgacaactggaacgcggtggcggtcggggcgggttgcgcacccagtgcaccggcggccacttgacggttctgctcgcggatcgcggtcaccacatcagtggcggtcaggttgcgcgaagcggttttgttcgggtccagccatacgcgcagggagtagtcgcccatgccgaacagctgcacatcacccacaccgccgaggcgcgccaactcatccttcacgttgagcaaggcgtagttggacaggtagagcatgtcgtagcgctgatccggggaggtcaagtgcaccaccatggtcaggtcgggggaggccttgtccacggtaataccgatgcgcgtcacttcttcaggcagtttcggctgagtccgggtcacacggttttgcacttgcacctgcgcgttgtccaggtcggtgcccagggcgaaggtgatggtcagggtcagcttgccgtcggcggtcgactgcgaggacatgtacagcatgttctcgacgccggtgatcgcctgctccagaggagcggccacggtttcaccgatgaccttggggttggcgcccgggaagttggcgcgcaccaccacggtcggcggcaccacttccgggtattcactgatcggcaattggaacagcgagatcgcaccggcgatcaggatcagcagcgagagcaccgctgcgaagatcggccgcgaaatgaagaacttggaaaaattcatcttgagtcgtttcccttaaccgcgtggagccgcgacggctgcgagcttgggcgcggttttttccggcgccacttgctccaggttgctggcttcaagcgcttgtcgttgttgggccaaggcggcgagggtttccttgctggccatcggaatggtttccggggcgaccggcgaccctgggcgcacgcgctgcaggcccttgacgataatggtgtcgtccttgttcaggccgctgcgcacgatgcgcaaaccttcgatcttcggccccagttccaccgagcggtaggccggcttgtcgccttccatcaccagcacgaacttcttgcccaggtcggtgccgacggcttcgtcgttgatcagcacggcagagtaggtgccgctgccgaccagcttcagccgggcgtacaggccaggggtgtattcgcccttgctgttatcgaacacggcgcggccacggatggtgccggtggccgggttgacctggttgtcgacaaagttcatctggcccaggtgcgggttgccggtctcgttggacaggcccaggtaaaccggggtggtcgcaccacgacggccttggcgggccagttcggtgtacttgaggaacacgcgctcatcggcgtcgaagtaggcgtagaccttgtcggtggacaccacgctggtcagtgcggtgacatcggcggtgaccaggttgccggcggtgatttcggcacggctgacgcggccgctgatcggcgacgtcacgcgggtgaagctcaggttcagcttggccaggtccaactgcgcctggatcccggcgacggcggcgcgggcttcctgggcggcggtggtgcgcgagtcggccagttcggcggagatcgcattgctctggcgcaggcgttcgccacgttgcgcttcattatcgctgcgggtcgcggcggcacgggtttgttgcagttgggcttcaaggcgacgcacttcggcctggaacggacgcgggtcgatctggaacagcaggtcgcctttctttaccaaggcaccttcggtgaaggccacttggtcgatctggccggacacgcgaggacggatctgcacggtttccggggcttccaggcgaccggtgaattcatcccactcgttgaccggttgttccagcaccttggccacgctgactttggcagctggcatggcggccgcttgttccggggttttgccgcacgcgctcaacaccactaccgccaaaatggccaaggggaagcgcaaatgtttgagtgactgttccatgaggtgcatccgccaatgtatttgagatgggcggatcatgcgcggcgctgtgctatgtcacgaatcgaatgaagcaaaggtaactatcattcggaatgatataagcgcgagattagccctctagcatgggggtttcgttagtgggctatcaataggcgtgatgacaattgtcttttgcaggccgtgcaactcaccggcgtagcgttttgagtgcgtccaactgtgttgatcaagcggattgcggcccaattgtcgagccatgatgcgcaggtggtctcagggtggtattggacgctggagggcagggtgcttgtgatgcagtgtgcgaccacggcagaattcagcggctgcgccatcgcaagaccgcgcattcaatgttgttgcaatctgaccaggaagtcgttgatgaccacgttccagaaccatgactgtcataccgttgcaacgctcggcggcgagttggcagcctttctttccaagaccctcggtgacatttgcgaacggatgacccggactcgcgcacagatcagtgagatcgatgctctggaactgcgtgatggtgacgcagaacgagatgcggcgttgttgaagacccggttgcgcatggaggacagccagcgtcgttacaatgcgcacaaaaaagagggctacggactgggatgggtgctgagccccttcgataccggagaggccaatagccaattcaaaaacgccgtggccaggcatgcagcggtcacccgtgactatgatgagcccaacgccaaggtgcagcgtgacagcgatatagcttcacacaatcagttcgtcaccgataagcgcaaagaacaagctgagctgaaggtcaagctgcagaaactcactcacgttcatcaagaactgaatggttttctccacgaggcgaacgaagccttggctgccgcgtgcggtcaaggttggttggcagccgatttcgccatgcacctcgccgggatggacagggcgatacgtcaaggcaatgtgtcgctggctcgcgggcatctgacgcaattagtctttcagaaacgcccggatgacgccctctactcccgtttgcacaaccaggccctggagctgcgcaagcacgcctattccgcccattacggggtgcctgtcacgggctgtttcgccgatatcgttgacgcctccgtccagttggcagccgccaatctgacggcagattgtgcaagtcaattgctaggcgacctgcacagctcggatcaatggcaattgttgaccacgttggtcgcgtcgcctcaaaacctgcgcattgatgtgctgtggtccatctattgggggatgttccgctgccaacagaaaatggcggatgtgctcaaccgtacggtgtcaaccgaagaccccctgaatggccggttcagtcagtgtgttgaagatgggctttcggagtgggcgtccagccatattccgctattcggctatcctgtgtcccagtcttatctgggtatgttgcagttggccaatactgaagaagaaacccgtgtgggcgccgatatcggcgtgattatcgccctgaatattggtgggctggtctgtcgcaaagcagtgttgttgcaagccaagcgcgcaaaagactgggaggctgacgtaggcagcaagaagggccaattacccaagctttccaagttgccacgcggcgggtattacctgttctatcacgaatcgccccaactgcggttggactcgccggttccaacagtgagttcagcgcaggcgctgcagcagttgatactcgatgcaaacagaaacccgaatgcgaccaagcttaagctggatgttcgcagcacgggttgggactgggccagcttcatcagctttggtctgtgtgatgcagcctccggcattggagagccctttgacaccgttgatgacgccatgcggattctaggcagtggtgagaccggagagcttcctcggcacctgttactgctggcgattgaagacgagcccttcacgcttgaactgacgaagcgcttgcgtaatcaataccagcgggcggagccccaacaggacagatcaatgagcaaaacctcaaaaaaggactacggcagggagggcgctgacttcgagctgtgatggttcgagcaggccatggcgaaggggctgccaggtcgatcaccaaatctttaatcatagcggctgagcgtttcagcccgaacgtaggtgccaaacacgtgatcccataacggtgaagagacaccaaagttcttctcgataccttggcggtggtgcagctcatgattggccaccaggcctggaatgaagcgatacgcccaatgctcggggcgatgcatcacgtaatgtaccgagatgtaatagaagtacccgctcacggcgccaacaaatgtcgacgtcaatccggtgaaccaggccagcagcaacagcgcggcaaaggtcgagctagttttccagctcgacacaccgatataggccagcacgtcgacgtggtgggtccagtgctcacggcgatacagcgagtgaaacaggaagcggtgcgccgagtactccaccagtgaccaggccaacaggcctgcgagtgccagtcccggatcaaaaggtgcgaggtacagggcaaggaggatgaagagggggacggtgaagaagtcgaggtaataagcgactgacgacatcagccatttattggaagcagccatgcgcggaatatccctgtagtgcccgacggtcgggggcgcgattctcggggatcgcgccgtcgccgacaactgtttcgcgcggcactgcgacacaggtctcacgctgcgcttgcaatgacctgccggccagggatagccgcaatcaattcccgcgtgtactcactggccggccgatggaagatctgctccaccgagccctgttcaatcacccggccgttgcgcaacaccagcgcctcatgggcgaagttggccaccaccgacaagtcgtgggacaccagcacataggcaatgcccatctcccgttgcagctcttccagcagctcaaggatgcgcgcctgcaccgacacatcgagcgcgctgaccggctcgtcgagtaacaacaagtcaggttgcaacgccagcgccctggcgatggcgacgcgttggcactgaccgccagacaactctcgcggtaaacgatccaggtagctgaccggcaaatgcacgcggctgatcaactgccgcgccgcgtgctccagcgcggcgcccttgagccgcccgaaggacaccagcggttcgacgatgctgtcgaacacggtaaagcgtgggtccagggcggcaaacggattctgctgcaccagttgcaggcgttggcgcagcgggcggaagtcgcgccagctcaggtgggtgacgtcctgttgttcgaaccagacctggccctgggtcggtttttccaggccgagggcgatgcgcagcgcggtgctcttgcccgagccggactcaccgacgatggccagggtctggccgggatacacctgcaggctgagatcctcaagggccacgaacgttgattcttcacccttgaccctgggcattacaaacgtcttgccgacgtttttcaggctcaggatcggttgttgtgtcgaatccatgcgcggcaagggttcacgccgtctggcgaacgccggcgcggcggcaatcagcgcgcgggtgtagtcgtgttgcggcgcgccgaggatctggcctggcgcgccttgttcgaccacttcaccgtgttgcatcaccaggatccggtcggcgcggtcggcggccacgcccaggtcatgggtgatgatcagcagcgaaatcccgcgctcgctgaccaagcgttgcaagtggtcgaggatcttgcgctgcaccgttacatccagggcgctggtgggttcgtcggcgatgatcaagcgcgggttgcccgccagggcgatggcgatcagcacacgctggcgcatgccgccggagagttcatgggggtactggcgggcgcgcagtacaggcttgtcgatgcccacctgttgcagcagttcgacaatgtcggcatcgacgccggggtagcgtttgcccttggccaggatcagcgcctcggcgatctgctggcccacgcgcagggtcgggttgaggctgaccatcgggtcctggggcaccaggccgatggtgcggccgcgcaatgcacgcttttggcgctcactggcgtgggtcaggtcgtggccgtctacccacagctggccggcggtgacctgcgcactgtccggtaacagaccgaggatagcgttggccagggtcgatttaccggagccggactcaccgacaatcgccacggtctcgccctgggcgatgctcagtgacaggcgattgaccgccgtgttgccgtgccgatagctgacgctgagttggcgtacatccactaaagcgctcatcgctggatctcctcgaaggtgcgggcgatatggttgaggctgaacaccacggccaccaggaacaggccgggcagcagggaaacccagggagcggtgatcaggaagtgtcgcccgttggcgatcaaggtgccccattccgcagccggtggtgcggcgccgaaaccgaggaagctcagcccggcggtggccaggatcgcggcgccgaagtccagggtcgccagcacggccaccggcccccatgcattgggcaggatgtgccgcagcaaggtgcgcccccagctggcaccgcccaggcgcgcggcctcgacgtagggcagggtcttgacccgcagcacctcggcgcgggtggtgcgggcaaaccccggaataatgccaatgcccacggcaatcgccaccggcaccgtgccgaagccgatggccgtgacaatcgccagggccagcagcaggccgggcagggccagcagtacatcgacaaagcgcatgatcaccgcgtcgatgcgccccccggcaaaacccgacaggatgcccaggcccagcccgcccaagagggcgatgcccaccgcaagaaacgctgccaggaccgataggctggcgccatggaccacccgcgtatagaggtcgcggcccagctcatcggtaccaaaccagtggatcaggttgggcgcgcgcagcttgtcgacgggcgaggtggcgtaaggatcgaagctgctcaacacgtgcggcgccacagccgccaccaaggcaaacaccaccaccagcagcgccaggctgaaccccggtcggcgtaacagtggcaacactgtcgccgtcacgcgttgcaggcggctgcggcggcgccacagcgcagggctggccgggagggtattgcggcccaggttctgctcaagaacggtcatggtctaggacacctttggcgtgtgggagatgcgcgggtcgaaccacgggtacaacaggtcgaccagcaggttcaccaatacaaatgccgccgccgacaccgaaacgatggcgagcaccactggaatgtcctggcgcagcactgcttcttgggccagccggccaatgccggagcgggcaaagatggtttccaccaacaccgcgcccgacaccgtattgcccacctgcaagccgatcagggtgaggatcggcagcgcggcattcttgaagccatggcgtgcctgcacctggccacggctcaggcccttggcgtacgcagtggtgatataggactctgtccagaccccctggaaactgcgttgcagcacctgggcgtacaccgctgcactcggaatcgccaaggtcacggcgggcaacaccaggctttccaggccccggctgccggtggccgggaaccagccgaggccgaaggcaaacacctggatcagcagcagccccatccagaacaccggcaccgaaaaccccaatgacggcagccgtgccaaggctttcttcagcggttgccaacggatgtaggcggtcaggtaggccaggccgattccgccaagcagtgacaacacgatggccagccccgccagggacagggtctgcggcaggcgttcggcaagcagttcggccactgggcgattcagtgaaagcgactgcccgaaatccccccgtagcgctcccagcagcaggtcgaaatactgctcgaacaggcctttatccaggccgtagtaggcccgtgccttggccaggtcctccgcggacagcgcgtcggcctccatgcctgacgcgctgagcatgatcgacaaggtgtcgcccggcagcagatacagaatgaaatacgtgatgctgtacgccccccacagcaccagcagtgcctggccgatacggccgatcagataacggctcatggcgtgccgatctcaatatcacccagcagcgcaaaaccctcggcggtccagcggaagttttttaccttgggcgaggtcgccgcctgccacacacgctcatacaccgggaacgcggagctttcatcgataagtaaatcctgcaggctgccataggcggcagcgcgttgcggggcttgagtggccgtgatgccggcatcgaacaagcccttggcctgttccagcaccgccggttcataggtgttggtggccagcgtggaactgttggcgctgcgcggatcgaggatggtctgcaggatgatcgggtcggcgcgggtcatgtagttgatggtcaggtcatagttgcccgccgagttgttggcgacccattcggcgcgggtcactacgctgagtttcaactcgatgccgaccttgcgcagttggtcctggatcagcacatcgccggcggtctcggccggggtgatgttgtagctcaggctcaggcgcttgccgttcttctgccggtaaccgtccgcacccttggcccagccggcttgatccaacaaccgctcggcgtccgccgggtcataggccagcttggcgccctggcttttgaagtacggcgtggtcacatcgaagatgccgtccaccaccgggaactcggcgttgtacacggtgctggcgtagctcttgcggtccagggccttttgcagcgccaggcgtacttgccgatcggccaggatccgctcgccacgggtgttggggtacaggttcagcgccggtcccggcagcgagcggctttgaatggtcgcgcccttggactggaacagcttcaggtcgacttccgagaacgggttgcgcggccacaggatgtcggccttgccttgcaggaacaggccgttgcgcacgctttcttcggggatgtagctgatgtccaccgcgtccaggtgcgcttcaccctggtttttcatattggccgaggcccaggcgtagcccttgcgcttggtcaggtgcgcaccgacttccggcgtgtagctggccagtacgaacggcccggtgccgatgatcttgcccagggagcgctccttcacgctcagcgcgtaggaggccggcgcgaggatcgccaggttggtggtggaggtggcttgcaggaagcccgcgttgggcttggccagcaccagcttgacggtgaagtcgtcgaccacttcggcgtggtcataacccgccaggtaggtggcgccgaaggtggccggcagttcggtggccagtgccttgtcgctgtcaaacgcggttttcaccgccttggcatcgaagcgttcgccgttgctgaaggtcacgtcctcccgcaggtggaaggtataggtcagcgcgtcgtcactgacttcccagcgtttggccagccagggaatgatcttgccggtgtccgggtcctggtcggtcagggactcggcgacgttgcgcagcagcacgcggtgctccagccaatagacctggaacgggtcgacgctgaccagggtggtgttatcgccgaaaaatgcgatgttcagggtcttgcccgcctgtggggcatgcccgggcgagcaggcggcgaggctcagcgccagggcgcagggggccagcagacggctcatcaagttggcggtattcaatggggtgccctcatgtggcgtgtggatcagaagtcgtaggcgagcttggtgtaccagtagccaccgcctgggtagaacggcgggttgccgtaggcggccaggccgaggttgctgtacaccgcgtttttgtcggggcgcacgtcgaagatgttggtgccgccgatgctcacggtgaggtggtcgatgaaggtgtagctgacgtccaggtcggtgatccatttggcgccgaagctgcggtcgccggtggggttgacggccagggtcttgaccgcgccgtagcgcgcggtttgcaggttgacggccaggtcctcgaccttccagttggcgcccaggatccacttggtcttgggtgacgcgtcggtcaggtcgccttcgcggtcgcggccgaccagggtcacgccggaaccggccagtgccgccggtgtgtcgcgtgtgccttcaatcgtggtcttgttccagttgaagcccaggctccagcgcacatcgccccaggcctccagcggtgtggtgtggtcggcgaccacgtccaggcccttggtgcgcgtgtcgaaggcgttggtgtagtagttgacccaggtgccggtcggtacaccctgggcggcgagaatggcgttgatcgcgccgttgccacggtcgtagatattgctggtgagggcgatgcggtcatcgatgtcgatcaggtaggcatccgcggtgatgctggtgcgcggcgccggttgccaggtcaggcccagccccaggttgcgcgatttttccggttttaggtcatcgccgcccagcgccttggccaggttgctgccggacggcgtcaggcgcgtcacggccggcaccacgttgccgttcacatcgacggccacgcggttgtcggccacggtgtagccgatctgggtcagggaaggcgcgcggaaaccggtgcccagggtaccgcgcacggctacggtgtcggtgagttcgtagcgtgagttcactttcaggccgaaggtgttgcccgaatcatcgtcgtagtgctcgacccgcccggcgacgtcgagaaaccagcggtccgtcaggtcgaaacccaggtccaggtagccggcgtagttattgcggatcaggctgacttcatcttccggacgaatcgtcaccgccgcctgtgcgccagacgcggcagggtaggtaccggtgatataggcctcgcgctcgccggcgaacgtactgaaatgctcccagcgatgttccaggcctgcggatacctgcaccggcggcgtcaggttgaacaggctgtcgtagcggcgggtgaagtcgaggttgttgacccactgctcgaagcggaaggtcgccaggttatcgaacctggtcggcgacgcggtgcccagcgacgggttgatattcaggtcgctggagtggtgcacgttgttgcgcccgtaggtggtgctcaggtcccagttccagtcggccaccaggcccttgccgccgaacagcaactggtagtcgcggtccttgatgttgttgagtgggaagtaaccgtcgggaaacacctcgggcactgcggcggtgccggtcggcaggcggaagtagttggcggcctcggcgtcgcgttcgccgtaggtggagaacgaatatagtgtcaggtcttccagcggcagttcggcgttgtaggccaggttgaaggccttgaggtccgggtcgccgttcttgatcgccacgcggtcccaggccgcttccttggccgggtcggcaaacgcccgcacgctgctgtcggccttgtcgttccacgacgcgctgccacgtttgcgcgcatcggccgagaagtgaaagaagccgccctggcccagttcgaagccctggtcacccgcgaccttgatggtctcgccctggccggaatacaactgaccgtagctggtctccaggtggccgccgcttttcccggacttgaggatgatgttgatcacgcctgcgactgcatcggaaccgtactgtgcagccgcgctgtctttgagcacctcgatatggtccaccgcgctgaccgggatcaggtcgatgtccaccgcattcgcaccgctgttatcgatggaaccgcgctggccggtggcgccgttatgccggcgtttaccgttgaccagcaccagggtgtaggccggtcccaggctgcggttgctcagcgggcgcgtcaccgagttgtagccggcgatgttggtgccgaagttgaaagaaggcagcagcttggcaatcgcctcggacaactcggcgcgcccggtcttgagcaattggtcgctgttgatcacatcgatcggcgccgggctgtcggccactgtgcgttgctggccacgcaggccggtggaaatcacggtgacggtatcgagcgtggcatcgtcggcgaaggcgggcgcagcggccaggagcagggagccggtcagcagcgaaagaggcaacttcttgagggacgtggggagtgcgatgtctggcatggagataacctggagggtgggggtgcgtcctccgccaggtatggggtcggtctgtgaagtgaagatatctctataaaaaacggtcgggaaagtcttttttggaataagctaattatcagttaatattatttatatctaaaataagattaactatttttattatgaaaaacaggcgtgctgcttatcgcccatgtcgactacattccaaggggtgcttggcggctatcgcgactattggactccaggcccatcactgccgcctggcatacagaagaatttggcgcgaggcaaacctctacctcatttatgaggtgctcgagggggctttcgattagggcgccgaagcctgacggtgggggcaccgcaccggcgcactcggatgatgactcaggctcgacgctttccagccatcaggcctgcaccgcagggcctttcaactcgatctgattatcatcagggtcattgagatacatcgacaacccggttccctccgcgccataccgcatcacggccgcttcagcggataccccggccgccgccaggtgctggagaatggcctgttcatcgaacggctcgacccgcaggcaaacgtgatcgacattgtgtctttgcttgcccgccggctgcccaccctgacgcccgatcggtccgttcacatcaaccaggtcaatcatggatgtgccagcactcaggtgaatcatgccgaggtcatcacggcgttttttgacatcacaccccagcacggatgtgtagaacgccaggctgcgctcaatgtccttgacccgcaaaacaacatgatcgatacgttgaagggtaaaactgcgcatttccatcactcctgatgcttgccgttgtcgaatgggacattgttcagggtagccgcagtttgagtgcactcaaggctggcagggtcgaaggccggatattcaaatggccgcaataggctagaggcagataacatgaaagagtggtcgtcgctgcgcaagtcgaaggtggggggtgtcgttgatctacgggaacaacgcgtgctcgccatggacgacggcgcgtacaagatttcagataatcaatattttttagctgacgcctgttctgttgagggagaggaaaaactgagtttgctatccctctactgggccagcagtgaggctgcatttcgaagggcctactacagggatgttgaaaatgatgacctggctgtatgccaaccgccggctgaattacttccagctggggcgggtgcgacctaccgtcagataaaagaggcgcttggcgctcttggttctgacaggttaatggagtacgcctcttatcgtgttatgtctgacggtgcatttgttcataagggcttggaaagcgcatcggctgtttattattttcggtcgcatgacattgctcatgatgagatgccttacgcgatactgtggaagcttttcagtgtttgattaatgaacgtcagggccctgcggtcaggttgaagtggtcgtacgcgactcccgaaagtcgacatttgcagtccccggttggtgtttcaacgaaggtgtatgcagagcagtatgtcggccctgggattgctacggcagtgccattgctgcactctcactgctcatttttgtacggggtaacgcatggactggagtgatgtgcgggtctttctcgcgattgcccgtagcgggtcgttgggcgctgccgccaagcagttgggtgtcagccatccgaccgtagggcgacgcttgcaggtgcttgagcagtccagtggccagcccattttcctgcgtaccacccaaggtctggtcctgaccgacagcggggaaaagctgctcagtctggcgcaggaaatggaacaaagtgccttggcaatcgaaaggcgccttgcgggggacagcgcacagccagaaggtgtgttgcgcatttcttgcgccgactggttcgcctgttatgtgctggccccggtcctgaacgaactggggcgacgttatccgctgatcgtgcccgaggtcatcgcagggcatcgattgtttgacctggctcgtcgcgacgccgacattgcctttcggatcgttcctttcactgaacccgatattgtccaccgcaaactgactaccttgagctacgggttatacgcggccgtcggatccgctgaccccgagccgcagggcgacggggtgggtttgatcaccatgagtgttgcccagtctcactatcccgatgtgcaatggctgcagcagcgttaccctctggcccgtaaggtgttcaccagtagcagccgcacagcccaggcgcacatgtgcgcgcaagggcagggtgtcgccgtattgccccgcgtcctgggcgaccagttgacggcgctgcggctgattgatccgcatgaaccgccaccgggtcgcgacatctggatgggttaccaccaggacatgcggcagatggacagtcttcgtgcccttgccgaccttgcctcgggcatgattggctcgcagcagggccgatgattcactctactgggcgcagggctgccgtttgcaattgcacagccggttggcgcgccaggcttaggctgagtcccgcgcccaaggccaggcatgccgcgatgcagagtatggaaacggtgaaggcgtgagtgatggcggccgcgtccgtatccgtgcccagaagggtgtagaaaatgccgcctattatcgccacgctcagtgatgtgctgatttgcagggtagaactggcaatgcccgcaatcatgccggaatacgcgggcgccacgcgtcctgtgatcattcgcatcaatgtcggcagggccagtccttgtccgaaaccgatcagaaacagaatgacggcgaggggctgcgcagggggcgtgacggccatcggtgtgtgcgccacgagccaggccaggagcacgaaccccagcacctcaagccccattccgacggggttcacgtaagcccccaggaaacgcctgaattgaggggtggaaagcgggccgagcaaaaatcccgcgccaaaaggaaggaagatcaggcctgcattgagtgggctcgtatgcagcgctccctgtaaatacatggaaaacagcaggaaaaacacgccgatcgcgtagaaggtcagggcaacgagcagtgcccggcccaacccaggcgtgcgcagcgcggcaggatcaagcaacggtgcgccttgcgcctggtgcaaacgggcttcgtagcgccagaacagccagcccaacagcggtactgccgcaagcgacagccaggcccacaagggccagccggcttcacgcccttcgatcaatggaacgatcagcgccccaagggtcgccatggacaggacggttccacccagatccagcttgcttgtctgttgcgcgcgggtttccctgaccacggcaatggcgatcagaatgaccagcaacgcaatcggtagattaaccagaaatatcgcccgccaccccaagcccatcaagtcgagcgatatcaatatcccgccaagtgcctggccggctaccgacgccagtccaaagaccgcgccatagagactcagcgccaagggcttttcggactcgggaaatatagcctgcgcagaagcgagtgcctggggcgccatgacggctgccgtcacgccttgcagcgaacgtccggcgatcaacacccaaggtgactcggcgacgccgcagatcagtgaggcaactgcgaaaccaaccagcccaaggaaaaacattctcatgcgaccgtagatatcacccagccgtccgccggtaatcagtgtcacggcataaagcgccgcgtatgaggaaatgatcaactgttcggcggaggaggccgtgccgagcgattgctggatcgagggcagcgccacgttcacgatgaaaaaatccagcggcggtaaaaacgcaccgaccaataagatggcgaacatcaaccagcgccgcggttccggtaggacgttttttgtctgtggcataaggtctcctgcctggaacccttcggttccagaatattcacgatggcgggtcatgctccgaatcaatggggcccaatctaaacgatcaaacttgggctgacgcctcacaaaattgaacgcccagcgttcatttatggcagtgccgtcgagtgcctgattcctctcaaaatggccgcactgtggttccagtcggtccacacaaacgagactgaggagtcagatatgtcaggtaaattcgctggtcaggtggcagtggtcaccggcgcatccaccgggatcgggtatgcgattgcgcagggtttgattgcagagggcgccaggcgtgtttacatcactgggcgttctgcagccacgctggaggctgcggtggccaggcttggcgatagagcgatcgcggttatttccgatgtcgcgcgccaggctgatctcgatcagctcaaggcgacgattgaggcccgcaacgatcagttggacgcagtgttcgccaacgcgggtatttgcgaaaagaacccgctgggcgagaccaccgaggcggcgtacttcaacctcttcgacattaacgtgaagggcgtgttttttactgtgcagacgttgatgcctttgttgaaaaacggcgcttcgattgtgctgacggcttctatctgctccagcaatgggatggaaggactgagcctctacaacgcatccaaggctgcagtgcggtccttcgccaggacctgggccaacgaactcaaaggccgcaagatccgaacgaatgtcctgagccctggcttcacccgcacccctttgatggacaacggcttgaagatgagcgaaagcgacattgccgcgctgcgccaccatgtcgagcagatcactccgctggggtacatggcccaacctgaagaaatcgcctcgtcagcgctgttcctcgcatccgccgatgcgaaatatgtcaacggggtggaactgatggtcgacggcgggctgtcgcagatctgacctcccgatcgaacctggtgcaacccttgcagagggttgcttttgtcgcttttgcgaagcccccgcaggacacctcaacatgaacagtgaagaattgaacacccgactggacgccctggaggtcgcgccgccatcgagtcgctgatcagcgcctacgccaatgccttcgatcgcatcgacgtgtcgctcctgagcggaatctggcacgaagagtcgacattggatctgccgggtttcggctcagccggaaatcgtcatgaaatcctggcgatggcgcaaaacagctggcgccagatgccacaaatgcaccactggatggcctacccgatgatcgaaatcaagggtgacagcgcggaggggatggtggctgccgattgcctgttccacgacactgaaaaagggccggtccaagtcagcgggttgtatcacgacaggtttgaacgtcggaacggaaaatggacgttcctgtcacgtcgttttgaactgcatttcctgacaccgttgaacggctgggtacccgtagcgggtgaggagaggtttgcaccaagcgaagatcagaacatgagtaaactcagagaaggttgatttgcggaatgttcaggatgtgacaatcaacttaacgagccaaaatttgccgctgattcggttttgaactcaggggatccagacaagctgcggcgcactgggttagtcggtcatgcaatgttattaaaggttttttttgaagcttgatggggacttcgattacaaactgtcggggtcgccaaaaaacattttgactgggctctagaacagtagtttcagcttggaaaaatagagttatgcccccagttatgcccccaattgcacagggtgtgcgagtgatcgcaaatggcgatctccgacggacttcgctattcctggccagttaagccgttgggccaggtcgctgatcagtcgttaggcaagtgcaactgcacttccatggcgtcatgaaggagtctgacgacatcgatcacgtcgtcgtttgtcacacgatagaacacgatatggcgtgggcttttgaccgttccatgggtttgtttggcctgctggcgtgaatagatgaggtgatagctgcgaaggcccggtgcaagttcatcgcggtcgtggctgccaatgcgataaggcgtgtgggcaagcgcttgcagcgccgcgaggatcagcgcctggtagcgctggcgtgcttgatcgccgaactgcgtctgggagagcctaaggatgtcgacaatgtcggcacgagccgggttggagatccgatactgcggcatgctcagtgtttctctctcgcagggagggttgcctccaggctcaagctctcgaggtagtgctccagatcaccctcgttcacctgagtaaagcgcccgtgctcaagatccatgatgccgatcgaggtcgcctgacgcagtgcctcaattttggcggtgtcttcggcgacgcgctgctccaataaacgtaaaccttctcgcatcacttcgctggcattctgataacggccggactgcaccaagtcatggataacctggtcctggtgaggggtgagcacaacatttcgcgtcgccataactagctccagttctatgcaaacagatacttttgatgttggcatattatgccaatttcgctctggagaatagcttggggccgacatccggcgatcaggtgacggctgacttggcgccaatcagcaaggttcaaagtcatcctcccataatgaaagcaaccggcagattgatttgaagattgatatgcctgactgtgcgtgggaggaggcgcgcgatgtgtgcttctcgatccgccctgaaatcgatcggcatgttcgatgcccatcaatatttgcgtttagaggcaccaagagaggttccaatgccctacgagttagaaaatcgcctagtgatcggcgtcgcttccagcgctgtgtttgatttgctggcatcggacgcagtgtttcagagtcagggggaggaggaataccgcaagtttcagcaaaacaatctgcacgtcccgcttcctaaggggatagcgttccccttcatcaagcgtttactgtcagtgaatgacctgagcgtcgatcctacggatccgctcgtcgaggtgatacttctttcgcgcaatgatcccgacactgggctgcgcgtactgaagactatcgagcattatgggcttgggatgacaagggcgattttcatgcagggaaaatctccttatgaatacataccagcactgaatatcgctttatttttgtcgggtgacaaaaaagacgtggaagcggctatcagggccgggtacccggctggccaggttctcgattcgaaatttgaagacgacgagactgataaaaccctacgcatcgcattcgactttgacggcgtgctcgctggcgatgagtccgaaacaatcatgcaggcctctggattgtctgagttccatgcgcacgaagtgaagaacgttatgcagccccataaccctgggccgctgaaggaattcatggtgcggatatccaaaatccagtcggtcgaggagaagcacaaaaagctcaatcctgaatacgaaaaccgcatacgcgtctcgatcgtcacagcccgcaatgctccgtctcatgagcgtgcgatgaatacactcaagagttggggtgtcatggccaatgacgcattcttcctgggtggcatcgagaaaggcaaaattttaggcgtattgaaaccacacatcttcttcgatgaccaatcagggcaccttaaatcgactagcgcagttgctccatccgtgcacattcctttcggcatcaccaaccatgtcgcgacagtggttgcgctagagcctgaagctgatcaggtccagcaggtgatgtaatacggaggattgagcgcgtaatgctaaaggagtccgtataggttcctcgggcagtccgagatcggatggggtaattaggattgctcgcgaacctgcatccagtcgaaaaaatcttcggatgcaaagccaacgctgcagttggcgtcgaaccgctcgttgattctgatgagcgtcatccgcttagcttcttgtggagaggtcgggaagaaagctccaccaggttcgctgtgcatgaagaaatcgccgagctttgctccgcagttttcgcagtgattcatcaggtagcggctgcctgccgttttgctgtaggcctgcctgaacttgttggtgaagtgatggatctgcttcgtgaccaagggagagaggctggcgacgttggagaccgttccgcgatacccattgcacttccattcgccgaggttgcttgtgagcgcgaaatcttcgtcctcatcctcgtagtaatcgaactcttcgtgttgctcgggcagcttgaacgagaacacgcgggtcaaattagagcagccccagcactcggacacggactctatgacgtagtaatacggtgctcttacactaaattcaggtccgtgctccaagtctgcatgcgttgttacggacagccattgagccaagggggcgatgtcgacaccttccgggatgtaccaagtcttcaggcttgggtcccatctggcaccgagtgatttcgcttcatctttttctgagaaggggactttcagatcaatccttgccatttctgtatccgtacgtattgctcatcagtaagcgcagctttaacctgaagcgactatggaatcttgatacctaaagcattcaacgatggcgtatccatccggccattcacggtcagcccactgtccatctgaaaggccatcaacgcaccacgtgtcgtcttgcccatcactccatcaatggcgccttggtaatactggcgcaccatcagcgcggtctgcacacgggtgaccaggttgcttttctgctcattggtcgcgcggctcttagaagtgctcgaacttgtcccgctggtagtgccagacgactgataaaggctgttgctgcttggggtgctgctcgaagcactcggcgcgctgtagcttcgggtgctggtagcgggtgggctgtagtagcgaggtgcgctatagccacccgagccgctgtagtgagaactgtgcgagctgtgggagctatgtgaactgtgcgagcgatgtgccgcatagatgttcacggcgtctggaacattcagcgtatcggcaaataccggtggttgcagcttgtcggcaggctgccagttcgcatcggcgagcgacatattgcccgcctgtgccagggtggtacctgccatcggcagcagggtgatcccactgatcaggactttccagcggtcaagcaatttcactgtgcactccttgcgtaggcgctaaaggcctcggtcgataggtgtcgtacgccgcggctctgccagcggtcggtgtgggatttgaagaagccggagcaatgtttgacggctgcgcattgctggcagctatcgatgaacaggttcttccagtccgagatgctctgccgggcgaaacgcgagaggtgggccgggatcaggcacaggggcaggttgtagatcgaaaccggcactcctcggttgaacaggaaatacacggcctggctcaacgactcctgatagtccagcgggtcaatccacagatcttcgtagtttttcctggccaggccggtgctttcgatacccatcagcgcaacatgccgcacgaaggacaggttcctgaaaacgtagtgggcgagctctggcaagcgtggcgcggtcaggcgattgagcaccacgcgtatctcgatgatctggttggcgcgcgccaggttgtaaagaccttgcagggtttcgctgaacgcgcctggagcctgcaccacatggtcatggtcctcggcattgtcggcatacaagggtatgccccagctcaactgatggtggccgattgcagagagcgctgcgatccagctcgggtcttggaacagacgcccgttgctgagtacatgaatggatttctgtggcaaaacggctttgcacttggccaggatttccagcaggccgtcgcgataaagcgttggttctccaccgctgattcccagattttcttcgcccgggtccatcaggtcgatcagccggaggttctcctcgatgtgccagcggtcatcgatatcttttggcggctgcgagcacatcaggcagaggctgttgcaacggtcggtcatgaacagcaggttgctgtctgagcctcgtcgatagagcactcgcaccaacgcgttgcctggtgtgatggcaatgacatcgccgggctgcacgacatccgcatctttgggggtgtgcaggtgtggccgcgcgctatcgaagttgccgatcaatggctcagggatcaggaatccacccactggtaatgagagcagatgcgggctccgtagccgttcttcgtttggcagccaaagcaacaggtcaccgagcccagcgcttccggcacaaacagccaagcctttttcgatgaactcatccagagtgatgaccttgagcagtttctgctcattaagatgatggatttcgaaatgggtatctttgcgtagcatcgccatcagcccctgtaacccggaaatcgaacatcgttgtaagagcgcctgttcaaccacgacagcagcaccctttggacgttgtcgtcgccatcgcaaagcaggccgaaaagatgcttcagcagccccatgttctttttgcagaagctgctgaacactcggtgtccgatcgggtcagcttggcgggcatagtgttcgatagggtcggcaccacagtacgggacaagtgcgcagtcggagcagcccggcagcgcctctgctacaccactggcgagcaacgcattcataacgggcgatgcgagtaattcagacaagggttggtgtacggtgccgagcctaaagccttcttcacccatctccagcaacattcgggcttcgtccgacggatagacgtaaccgtcatagttgtaaaccagcgccgcagtgcctgcgccagcaggggagcggaggtctacatagccggaggagaagggtgtcaggatattcttcagcaacaggctcgtataactctctgagaggtatacgcccttttggttgatatgcagcaaataggccagtgccttcttgtagaaggccaggtatcgctcaatagggtaatcaagtcgatgggcactcttggtggcaaacccataagggctcagaggccgaagcgagatgctggagaagccctggcttacatactcatcgatgatcgcttcaggctgttcgaggcttcttgaagtcagcgtggtcaacgcggaaactgcatcatggccaaggcgctcacggacccactggatgccttttacagtgcgctcgtaggagtctcgtgacggggtagggcggttggcattgtgcaagggcgccggcccatcgagcgaggtcgaaaactggatgcgatattcttctgcgaagtcgagtatttcctccgtcagatggtgcagtgtggtggtgatgacgaactggatatcccgttgttcgaccacgttccgttcgacgacccattcgacaatctggcggacgcgctcgaaggccagaagcggctcgccaccctgaaactccacagtcaaggcgggagcgttcgattcgaacagacgattgaccgccgcctgtgcatccgcttccgacagatcgtggccggatcctcccagaggggcccgcgacacctggcagtactggcaggtgtggttgcagcgcaatgtaaccacgaacaagtgcagagcagggccctggaagaggaagtccttgcggctgcgatactgcgcagccatttccgggaacgggtcgtggcggcctggttcatagatgaagtggcgggccagcaggtccttgtaaaaaggcgtacttgcttgaacgtcgaagtaactgagggctcgtaattgcgcgtcgttcacgtgcatgtactcaccggtatcggaggtgagcaggatgtcacggtcatgtcccgtgttcatgcgcatgaatcgaaaaggcagcaagcggtagtgcttggcgtctgtcgcaatcagtgtcactgcgaaaccccacatccagcgagagcggctcgggccaggacctcgcgcaatcctactgtttcgcgattgatatggtcgcgtagggcgaagtcgttcagatgctggaggatcagtgagtgagcctgctccggggaaagcgttagccttgcttcagcggggtgggccgtgagacttatctgattggtttcaataccgacctggatcgcgacagtgtcggcaagggaataagcggcgcgttgcaccacgctgagcgggtaggcttcgctgtcgagtttcagcgtgacaggccatgtcatcggaaccgctccttcaaatccgttggaaacgtgtggattttgcaggttgccgaggcattatgccatcataattttttacatttgcacgcatttgtccagcgtggtgggtggtgcgctcactacggctcggccattgatacgaggtagggccgaggcttcgtatctccctcagtccacccattctcatcaatagcctgcttggcgtcaggctgggggcatccttttcaaaccatccaatgcatgccctcagatatgcccccaatgcagcaatccaccggaagtgagtggaactccatggtttgtggaaaggcagaaatgatcagccgaacagcctgccagacgacgtctaaagactctcagggtcgccaaaaaacattttgacttggctctggaacggtcttttaaggtccgaaaaacttttcgatgcccccattttggcccccacggcgaacatctttattgatcagcggtggctgttcgcgagggcgcttggcggccttgagaatccgggtgcgcgaggttgactcgagcagggatagggttgcgcggtgaattcggtctctgccgcgtcttgcgacttgatatcaacatttcaacgccgaaacaaaatcatacatttaattgacgccatcaaatcgccactctaagatcgccgaaaaaaatagtggcacaaggccacttagagggatctagaaatgtggcgttcggtacgtcggaccaggctttgcctgctgttcgcatttttttgcctgagcacggccgggatggcccaaggcgcaaccccgcagaacacgccaggcgtcaccgacctgatccgtgaccgtcaggatcgcctgctcgaagagcaacagcgccgcctcgaagagctcaaggacctgcccggcaaagccgccgccccagccaagctgacagcgcccgccgacactcgctgtttcgccatcaacaccattgaactcagcggcgccgacgcgctgtccgaaggcgagcgcgccagcctaaccaagccctacatcggccaatgtcttggcgtgccgcagctcaatgatctgctcaaggtcatcaccgaccattacttggccaaaggtctggtcaccagtcgcgcctacctgccgcaacaaaacctcggcagtggcaacctcaaggtacaagtggtggaaggccgcttggagggcatgaagggtgcagagggcagcgggatcactgaccgccagctcgccatgacttttccaggccaaaagggtgaattgctcaacctgcgcgaaatcgagcagatggtcgaccaactgaaccgccttccctcaaaccaggcgcagatggaattggcaccgggcaaacaagtcggcggcagcgaggtgttggtcaagaacaccccgcaaaaaccctggcgtgttggtctatctcgccacaacggcggccaacgcagcaccggcgaacaacagtggggcgccagtctcgattgggataacccgctcggcctggctgaccaactctccctgcgtggcgcacacgacgccgtcagcgatcaccagaaaacctcacgcaactcgatgctcaactacaacctgccgtttggctggtggaacctcaattacagctacagcgagactgaataccgctccctggcccaggccagcggcttcaacttcaagcagtccggtgacagccagagccaccagttgcgcttggagcgagtcgtccaccgcgacgctctgagcaagacctccctcagcaccggcgtggcctacctgcgcaccaacaacttcatcgaagacagcaagctcgccctgagcagcaaccgcctcagcgaagcccagtttggcatcaaccacggccggcgcattggcggttcattcctcaacatcgacctgggcatgcaggacggcattggcgcgttcgacgcccaggccaaccacaacccacgccccggccaggccgatgcgcgctaccgcaaatacaccgcgacggtgagctacctgtaccccttcaagctgtggggcgagtcattcagcttcagcagcctgatgaccggccaacgcagcgaagacgtgctgttcagcccgcaacgcatgagcctgggcgggcagtcctcgattcgtggctacaaggaccaaagcctggccggcgatagcggcggctactggcgcaacgacctgcgctggagccgcccggtgacctgggtgtggctgcagccggcgttcaacgaatacggcaccagcctcggctacgaccaaggcgtgatccgccatggtcgctacaacgccgaacagcatgggcgcatgaccagcaattccctggaactgtttgcacgcggcaagaacgtcgcggccacggtgacctttgcacactctttggaacgaccggacccgatcacggaacgtgaagcgccgatctacttccgcatggatttttttctttaaattcttaccgccctttgggcatcgagatacgacatggatgttcgccagttcgccttcctcgcgcgccaaccgtctgcggccgtaaaaagccgttccaccttcctgggcttgcccaagcgcgggttggcgttggtgctggctaacgccatgttctggcagccgctgctggctcaggcggagggcattgccgtgagcgggccgggtaccacactcgggcaagcgggcaatggcgtaccgatcgtcaatattgccgcgccgaatggcaacgggctgtcgcataacaaattccaggattacaacgttggccagcagggcgtgatcctcaacaacgcgaccggtcggacccagtcgacccagttgggcgggatcatcctcggcaaccagaacctcaacggtatggccgccagcgtgatcctcaatgaggtcaacggcggcagtcccagccagttgcgcggtttcaccgaagtggcagggcagtcggcgcatgtcatcgtggctaacccgtatgggattacctgtaacggctgcgggtttatcaacaccccgcaagccacgttgaccaccggtaaagcggtaatcgaaaacggccagatcagtcgctaccaagtcgatcaaggcagcgtgtccatcgaaggcgcaggcctgaacgccaacaacatcgaccagttcgaaatcatcacccgttcggccaagctcaatgccgagattcaagccaaaaacctgacgatcattgccggtgccaacgacgtcgatgccaagaccctcaaggccaccgcacgtgtggccgacccagcaacagccccgcaactggcgatcgactcttcagccctgggcggcatgtacgccggggcgatcaagctggtcagcagcgaagccggtgtcggggtaaaactcgatggcaagatggctgccagcgcaggcgacatccagatcgacgccaacggcgacctgaccgttgcacaagtcgccgccgacggtgcagtgaacatagaggccgtcagcgccagcattcaagggcccgcctacgccggcaccacactggagatgaaaacccgaggcgacctgaccagccagaacaaccttgtcgccaaggaccgcataaccctcaccagcggcggccagttggtcaacaatggcatcatcgaaagcggagtcaatcccgataacacccgcaacaccaacgccgatatcagcatcagcgcgcagagcctcaacaacgccggcaggaacatcattgccagccgtgacctcgacatcaccaccacccagactctgaacaaccagggcggcaccctcagcggacagcggcagaccaccgtcaccgccggcaccttcgacaaccaaaacagggggcggttgctcagcaccgaccgtctgaccttgaccgccgacaaggccgtgaacggccgggacggtctgatctccagcaacggcgacctggtggtgaacgtcggcgcattgggcaatcgcggtggggaaatctccagcctggccgatgtcaccctgaatgtcgccagcctcgacaatacgtccggcttgatcgcggctgacagggggctcagcctcactgccagcggcgcgatcaataaccgtgacggcaccttgtcggcttcaaccctggcgaccttgaaggccgtcagcctggacaatacccgcgggcagattaccggcgatctgggcttgagcatcgacctcagcggtgccttggataaccatgctgggaccctgggttccggcaaggccttgactctggccgccgccagcctcgacaaccgcgcggcgggcacggtgctggcggcggacggcacgctgagtgccgccgttcacggcgcgctggataaccgcgaacagggcaagctgcgcgccacgggcagcatcgagctgaccaccggcagcctggacaaccgcggcggcagcctggcgggcaaggaccacctgaccctacgcggagggtcggcggacaatcgtggcggcctgatccaggccgacaaagacctcaagctgctggtcgatcaactggacaaccgcgacaagggcaaccttgtcgccaaggcggccgtcagcttcgaaggcacccgcctggacaatagcggtggcctgctcagcgcagtcggcccggtcagtctcaaggccaaggaggttgccaacacccagggccgtattgccagccagggtgacctcgaagccagcatcgacagcctcagccagcagggcggggcgctcgtggcccagggttccatacggctgaccggcaagagcctcgacaaccgcaatggcggcacggtcgccagcacccagggcctgaccgtcaatgtcgagcagatcgacaaccgtaccggcgagctgtccagcacccacagcagcgtcagtgtcagcgggcagcgtttggacaacagcgatggcggcaagctgctgactgagactgatcttggcgtcgcagtggcgcaagtgatcaaccagaaccagggccggctgttcgccaggggcagcgtcaacctgaatggcaagaccctggataacagcggcggcaacatcttcgccctgctgggcctggatatccgcctcgatggtgcgctgctcaacaacaccggctcgctcagcagcgaaggtgcgctgggccttacggtcggcagcctggacaacacggccggcaagctcggcagtgccgccgacctgttgatcgacagtctcggcgcggtgctcaaccagggcgggtcgatcctcacggaccagggcctggtgcttgccagcggcagtctcgacaacagccagaaaggcctgatcagcggcgagggtgcgacccgcgtcaccaccagcaccctggataaccaccagggtggccgccttaccagtggcgaccgccttgacttgacggcaacccaggtcaacaacggcgcttccgggcgtattgccagtgccaaggatctgacggccaacgtcaccgtcctcgaccaacagggcggcgaactgttcagcaagacccaactgaacctggacctgcacaacggccgcctggacaacagtggcggcctgatcaacggcccgctgctggtgctgaagaacctcgacgtggtcgtcaaccagggcggtgaaatctccagtgcccaagcctttgccctgaccgcgaaaagcctcgacaacagcaacggcaagctgctgagcaaccagggcctgaccctgcgtatcgatcaggcgctgggcaacatcaagggcctggtggccgcggcttctctcgacagtcgtagcgccagcctggacaacagccagggcctgatcagcagccgcggtgcggtcgacctcggcgtaagcggggcgttcatcaaccagggcggcaccctggtgggcgatggcgctatcctgttgacggccaacagcctggataacagcaacggtgccgtttccggaaaagccgatgtcaaagcgaacattgctgctctggataaccgcaacggcaagctgatcgccagcagcgcgctagccctgagcggcgcctccgtggataaccggctgaacggcctggtaggggcgacaaaagcgctgacactcgatgtcgacgttatcgacaaccgccgcggtgaactctccagcagtgccgatattcgcctgaccggcaagcgcctgaacaacagcgacagcggcaagctccttgccgataccacgctgacccttgaaatggccgaagtgttcaaccgcaacctgggactgctcaagggcaagactggcatcacgctggacggccaggccctcgacaacaccggcggccaactattcagcgaccaggacgcacgactcaccctcggcgctgacctcgacaacagcgctggcctgatcagcagcgaaggccggctggacgtcagcagcgtcgggctgaccaacacggccggtagtctgtcgagtggcggcgcgctcaacgtcaaggccaacggcacactggccaaccagggtggacgcctggtcagcgacagcagcatcaacctgaacagtgccagtctcgacaacacccggctgggagtgatcagcggtaaaggtgcggtgactgtcactaccggcgcctacgacaatcgcaccggcagcctgagcagcagcgacagcctcgccctgacggcagggcaggtcagcaaccagagcggccgcatcggcagcgacaaggccctagtcgccagtgtcaccggcctggaccagcaggacggcaagctcttcagcaacacggcactgatcctggacctgaacaacggccaactgaacaaccagaacggcctgatcaacgcaccgtcattgcggctcaacgacctcaagggcgtgaacaaccagggcggtgaaatctccagtgcccaggccttcgtgctggccgccgacagcctggacaacagcagcggcaaactgctgagcagccaggccgtgactctgcggatcaaccaggcactgagcaacctcaagggccagatcgccgccgccgcgctcgatatccgcagcgccagcctcgacaacagcggcggtaccgtcaccagccggggcgacctcgacctgaccaccggcggtcaactgaacaaccgcgaccagggcctgataaacgccgcccaagccctgaacgtcagcgccgccgacctcgacaacaggggcggtaccctactgggtgccagcaccgtgaccctcaacgccatagccctgaacaacagcgccaagggcctgatcaacagccaggccggcctgacgatcaacgccagccgcctggactcaggcaatggcggcgaagtctcggccaagggcgatatcgacctgagcctcggcgccctggcccagaacggcggccgcctgctcggcgaccaagccatccgcctcgacctggcggggggtgatctcgacaaccgcaacggcctgtttaacgccaagggccccctgaccatcaatcgtctgcatgacctgaacaaccagggcggcgagctctccagcagccaaagcttcaatctcaccggacggacgctggacaatagcggcggcaagctgataagcagcaaccagttgggcatgaccggcaacagcctgatcaaccagggcggcctggtttccggctggcaggggctgaccgtcagcggcgcgagcctggacaaccgcaacagcggcaccttgtccagtcgcagcggcaaccttgatgtcaacgtgagcggcgcattgctcaacagcaatgctggtgcgctggtcagtcagcagaccctgaccgtcaacgcggctagcctcgacaacagcgccggtattctttccagtggcgcggaccagcgcctgacggtcagcggtttgttgaacaacgcccagggcggctccatcgacagcgccgccaccctgacactgcaagctatgagcctaaacaacagcggtagcatcagcgcgcaacaggccctggatttcaccggcaacatcctggacaaccgtaacggttccctgagcggcaaggccgcggtcagcctcgacctgctcggcgccctgaccaacagcaatggccagctcgccagcggaggaccgctggtgatcaggcgcagcagccagatcgacaatcagggcggccaactggtcagccaagggggcctcagtctgctcaccggcagcctggataaccgcaatcgcggcaccgtcgcagcgaatgacaacttggtgatcagcagcagcggtgccgtacagaacaacagtgacggcctgatctacagccagaacggtggcgtccgcgtcgacgccgcgagcctcgcaaacgccaagggttccctgcaagggcaaggcacactggacctgacggtcagcggcgatatcgacaatcagagcggtaagctgattagccagaatggcgacctcagtgtcagcacggccagcctcgacaaccgtggcggcaccctggccagcctcaagggcgccttcgaagcccacgtcgtcggcgtgctgaaaaacggctatgacctgagcaacaatcgccagggcggcatcattcaggcccagcgtctcaacctcagcgccctgggcgggatcgacaactacggcgggcgtatcgcggcgcaaagcggcgatgccctgatcaccaccgccgacttcgacaaccgcaacggcggcctgtacgcccagggcctggtacaggtcagcggcaacaacttcgacaacagcggcgacaacgacggacagatcgcaggccagcgcatcgacctcagcctcaacggcgcgcttaacaaccgcctgggcgttattgaaagcgacagcagtttgagcgtgcgtgcggccagcctcgataaccagaccggccagatccgtgcactgggctccggcggcaagaccgacttccagatcggcggcctgttcgataaccgcaacggcaagctggaaaccgccaacagcgacctgaccctcaatgccagcagcttccagaatatgggcggcagtctgctgcatgtgggtaacggcacctttgatatcagcaccgccaatatcaccaacgccggcggcagcctgttaacccgtggcggcctgaccttgacggcggacaactggaccaacagcagcgtgatccaggccgggcgcctgacggtgaacgtcaacaccctcaaccagacggcgggcggacaactgctggcctcggacagcctgaccggcaacggtggcaattggaacaacgatgggctgatcgccagtgacggcacggccaacctgaccctggccggcacctatggtggtaacgggcgctacagcagcgtcggcaccctgggcttgagcgcggcccaggtaaccctgggcactggcacgagcattgccggtggcggggataccacgatcagtgccggtggcctgagcaacgccgggcgcctgacgtccggcggttccatgacggtcaccgccaatagtatcggcaacaccggcacgctgggagcgacccaggacctgacgctgaagactccctccctggtgaacgatcacggcctgatcttcagcggccgaaacatggacttgctggtcaatgacttcaccaacgacaacggggatgtctacagcatcggcaacctgaacatctcgggactcaatggcggtcgcgccaatagcgtgaccaacctggcgtcctcgatcaatgtcgagggggatttctcgctgtcggcgaacagcttcaacaacaagaccgaaggggttatcggcaaagagcggctggtgtcgggcgatatcacgtttaacggcagcacgttctatatcgccgaaaactacacctcggagtcgaccatcagcggcacgcgagcgagcctggcggtggccggaaacattgatggcgatgtcggccgcttttccaacaccgcttcgacgatttctgctggcaagaatattcgcttgaacgtggataccttcgagaacctggggttggaggccggcaacttcgcccgtaaccgggtctataccggcgtgcgcaatatcttcactaacaaaacttacgcgaacgaagcgctggacgcctacgcgcgaagatattcccagtacgtctaccgatacaccaagaccgtgcatgagcccgacaaaggcgggactcacaccgagctcaacgattacggcaaacaaaaaaccacaaccgtgaacaccaaattcggtcagggaccggatgtggccattcccgccggcatcctggccggcaccctgagcagcgacaacaaagtgtttaccgccgggggtggcagtgtcgcctcggtggtccaggccgggcaggcgatacagatcaacgccaagaacaccatcgacaacagcaacctgcacgccaatacccagttctccgggacgacgaagaccgggaccgggacccaggtcggcagcgcggccaagccgacggtcgtctacctgaatccgcaactgccgccgaacctgtcccagcagcgggtggaccccgtggcgtcgcggggtttcagcctgccggacggacaaaacggtctgttccgcctgagcggccagggcggttctgcggcccaggcaagccaaaccagtgccgggccacagagctggagcatgggcagcgcgacagtcagcagtgcccagcgcgaacagggcgcggatgacgtccaggcgcgcaacctgcagttcagcgatgcggcgcggatcgccgtgagcactcttcaactcggacaaagtacccgccaggccacgggcgctggggtttccggcagcgtgatcagtgtcagtgcgcccggcgattccggcagtgtccagttgccggggcaggcgggcgtggtttccacggtaggcagccaggtcatcaatcgcgtgcagggcctgccggacacttcgggcaggtccaacccgcagaagtacctgatcgaaaccaacccggtgctgaccgacctcaagcagttcatgagttcggactacctgctggcgaacctcggttacaaccccgatcaaagcgccaaacgcctgggcgacggtttctatgagcagaagctgatccagcaggcgatggtcgagcgtaccgggcagcgtttcatcgacggccagacctccgacgaagcgctttacaagtacctgatggacaacgccatcaagagcaagcagcagctcgacctgtcggttggggtcagcctgacctcccagcaggtcgcggcgctgacccacgatatcgtctggctcgaagagcatgaagtgaatggtgagaaagtcctggtgccggtgctctacctggcccaggcgaccaatcgcctggcgccaaacggggcgctgatccagggcggggatgtgacgctgattgccggcaaagacctgaataacgctggtacgttgcgggccagcaacaacctttccgcgaccgcgggtaatgatctggtcaacagcggtttgattgaggccggtaaccgcctggatctgctggcgggtaacgacattatcaacaaggcgggcggggtcatcgcggggcgtgacgtcaatatgactgcaatcgccggcgatgtgatcaaccaacgcacggtggtgggtaatgacgtcaattacaaaggttacagcgggcacaacgagtatgccgacagtggcgctcgcatcgaggcggcgaatgacctgaccatcaaggcctcgcgggatttcgtcagcactggcagtacgttgcaaagcggcggtgacacaacgatcaccgcaggccgggatgccttcattgctgccgctgagcagcacaacagcgtggcggccggcgccaagagcagcagcgttacccagtacggctcggatctgacggtggggcgtgacctttctgtccaggcggggcgtgatctggcagtggtcgccagccagatagaggccaagcgggacatcgactttggagcgggcgataaccttacggtggcttcggctgccgatgaaagccactcgtattccaagtcgaagaaagttacgaaacaggaagatcacgtcaaacagatttccagcgtcgtgagtgccggacaagacgttactttcagtgccggcaaagatatggcgctgatctcgagtcggatcaatgccggcaacgaggcttacctggcagcggttggacaactggatgtactggcggcccaggacaccgactactcgctgtatgacaagaagaagaagggcagctggggacgcaagcagaccaaacacgatgaggtgacaaaaaccatcaacgttggcacccagatcaccacggggagtgatctgacgctggtcagtggtggtgaccagcgttatcaggtcgcgaagcttgaaagtggcgcggatctgacactgagaagtggcggagccatcaccttcgagggcgtcaaggatctgagccaggaaagccacgagaagaccaacaatagcctcgcgtggaattcatcgaagggtaagggccataccgacgaaaccttgcgccagagcgaattgatcagcaagggcgacctggcgatcactgccgccaagggtctgcacatcgacatcaagcagattgaccagaagacggttagccagaccatcgatgcgatggttcaggcggatccccaactggcctggctcaaagaagccgagcagcgtggcgatgtcgattggcagcgcgtgaaagaggtccacgactccttcaaatacagcaactccggcatgggcatgggcgcaatgctggcggtggtcattatcgtaacggtagtgacggcgggttcgggaacggccgctaccgttggcgccagcgcaagcggcgccgcgacagccgcggggctcagtgcgaccactgccgccgcgattggtgcggctgcatcggcagcctataccgctgccgtggtccagactgtggtcagtacgataaacaacaaaggcaacctgagcgcggtccttaaggatgtcacctcgacggaaagcctcaaggggtatttggtcagtgggctggttgcgggctttgcatcgggtgtactggacaaggcgttcggtgtttccgccgaaaatgccagtaaagcgacccacggctttgacctggccagcaccaatgaactgaccaagtttgttggctacaccctggctgaaaagggctttggtgcagttgccaatactgcgatcaatggtggcagcctcaagaacaatctggcccaggccagtatcagtgcggctgcggatgtcctctcggcctccatctataaccggttgggtacccagttggaattcaccgggattccggccaaggtcggggcacacgcgattgtcggtggcctgatcgcagaggcggcgggaggcagctttcgtaccggtgcccttgccgccggtgccaacgaagcttttgtcgcttcggtcggcgacaagatctttgtgggcgacatgcatgatcaactgctggcgatgacctcgcagttgatcggcgtaacggtcgctggagccgcagggggctctgataaagaactggaagtggcgggctgggtcacccagcaggccaccaagttcaacagcctcgatcacccaactgccgagcgattgcttaacgagctgaaggcctgtaggtccggtggaaattgcaccgaagcgaaacagcgcgatctgataggcaagtatgaaaagatctcggccgaacgttcgcagttgatcgacctatgtgaaacccgggcctgtgtcgaaggcctgaaagccaataccatcgctatggacgacccggttgcgcaggagttggtcagcttctaccggaacaaggtttcctatgacatgaccgggatgctggtgggcaatccagggctcatcgcgcaaccggcgcaagggtatgacccttggggcaatatctatgtgaccgatgaccagatcatcacggccaaatacatcaaggaaggctggttgacgcccgccgagagcgccaatctcaaggagtgggagaacaagacctcctggctggacgatgcggcgggtcggaaactcagtgtggtcgaaagagccgccatgatcagcaacatgggcaatacgttgctgaccgagggctgggggaccaaggttgttgcgggtgtcggtaaaggtgggaaacccggcaatggtgtgtcgacggatgccgatggggtcggaaatagcgccgttgttacgaaaccggtcaagccatgctgtttcgccgcaggaactatggttgccaccccccagggcccccgggccattgacaccctcagcgtgggagatattgtctggagtaagcgagaaacaggaggggagccgttcgctgccgctatttcggctacacacgttcgtactgatcagccgatttaccagctcaagttgaaaaacatccgagcagatggagtttcagagaaagaaacgcttctggttacaccgggccatccattttacgttcccgcacgacatgactttgtgccggttatccagcttaaatcaggcgatttacttcagtcgttagggggcggtcctactgaaggtgtctcgaccagggttgagtctctggagttgtttcttccacaaggaaaaacctataacctgaccgtggaagttggtcatacgttttatgtgggtaagttgaagacctgggtgcacaacgttggtctgtgcgatattaatggcaagcctgtagtgccgaggaatgccaagaatctggaaggcggacctctggagaaagccgataagttcagtgggcattttatgctggagggagggcctgccaatggaactctttatcgtgctgataataaaggaaatataacgagttatgccgtttatgatgataaaggtatgattctcaaacgggtcgatgtgacgggcgattcacatgcagggatacccacgcctcatgctattgactatggtcgcaacaagttgccggatggatcgatcagggtacaatctccatcgagcaagaaacctccacggggcatcagtgcagaagaaattccatgaaaataatcaagattacagactcagtcagttctccaagatacgagcattggaaaagccaatgggaggatcagtccgagttggatgagttttcttatattagtgatgttgtgcatcctgaagatgccttgttgttttgcaaggttttatttccagattttgtcattcatgaatcaggtgtgtttctggagcacagctttacttttgacgcgttctctacttggatggaaacttgtaataatgatgtagtggcagtggagaaggttttgaatcatacgcatctgtatgatgtttttggaggttgtagggatagagtggatgaggctgtttatgaacagctttgcaggattgttgctcagtcatggaggatggtgttgctgagtaaatttccagaaaagaaattttgtgtgcaagcgatagtctccgatcaggaatatggcccagtggttactttttctcaggtcagagactagtttttatggatgccttctaatctatagttttttatggtgggaatttcggtttgatcgctcccacgccccagagtggtagcttttcaccggacgctctgcatccgctctttgtgacacagagtgtcacgggctgcattccacgccggagcgtgggaatgatcgcattacaggctatcggggtctccggactccagcggatatgatggtctgcgcctgattcgagaggagagcacttctgtaagcgctccatgaaccccaccttcaaagcgcttagctgatctcggatgctgtgctctcgattctctcaggagccagcacaccatgatgcgacccgatgccaaagtcgaaaaagtctatctctatcccaaacccgtgtactttcgaaaatccattgatggccttgctgcgctggtcgagctggatatcaaagtcgcggtattcgaccctgtgcttgcctaagccttgtggcttttgcgggcgtatattctttgcagccgattcttgaagctgattgagccggcgttttccgcgttcggccagcagccacataatcgtgccgatacccgctatgacaccgatcgctatccaggcgtttttggggatcgcagcgagagcactgaatgccatagcaaaaataataagtatgccggtgccaccggagttttttgctttcttccttgccatgtgtcatttcaaccttgaaagatgggtactggcgcaatggcggtatccaatatttctaacgcttgagccaatggcttggctgagcagataatcggaaagttgaacgatctgggatggaaatgtcatttcagctcgaaatttaatgcttagcgtatttcatctgaacgtcgcgacatttacgtgagccatcctcagtaatttcaagcaacagtagtgaggcctatctgacaacgacctgagtctaacggagccttccgcccccattaatagatacggaccacatgcccaggcggacattcctgcgggactttcagtgaatcacgccgctcgagcatccgtgtttgccggcaggagcggacaatttccagcgcttgagcgaatgtgcttgatcccccccctgcatcggcgctacggggtagcgtaggcagtagttcagccattaactgaggtcatcgactagcgctcaacggcggttgggaacagtgcaggggagacttttcgaaaatggaactgttgggcctcaggctgggggcatccttttcaaaccatccaaagcatgccctcagatgtgcccccaatgtagcaatccaccggaagtgaatggagctccatggtttgtggaaaggcagaaatgatcagccgaacagcctgccagacgacgtctaaagactctcagggtccccaaaaaacatctgaatccgcgaccgcaaccaccgctctcccgggtcgttatcctgcgacccacgccacgccatgtgcagttcgaagctgcgcaccggcaacggcggatcctccgcccgcaagccccctgccgaggtcaatgcctcggccgcgtagtccggcactgtcgccaggatgtccgtgcccgccagcaacgtacccaggccgttgaattgcggtacggccaataccacgtgacgtttgcggtcgagcttttccaactcttcatcgataaagccgctcaggtcgccggcaaacgacaccagtgcgtgtggccgcgaacagaagtcgtcgaggctcagggagcctggcacgctgtcagcgcgcagcagtttgggcaggctgcggcgcagtactttgcgtttggcgttggccgggaggtcggcggtgtagctgacgccgatggagatttcgccggaggccagcaagccgggcatcaggatgtaattgacgcgacgcaccaccagcacgatgccgggggcttcggcgcgcaggcgtttgagcagttggggcagcagggcgaattcgacgtcgtcggacaggccgatgcggaacaccgctgtgctggtggccgggtcgaactcggcggcgcggctgacggcggtggagatcgagtccagggccggggagagcagggcgaagatttccaccgcccgggccgacggctccatgctgcgaccggtgcgcacgaacagcgggtcatcaaacagcccacgcaagcgcgacaacgccgcgctgatggccggctggccgaggaacagtttctcggcggcgcgggtcacgctgcgctcatgcatcaaggtttcgaatacgatcaagaggttaaggtcgacacgacgcaggtcgttacggttcatcttgtgtcctggaagagtcagcaaacttgacgagagcagccatataagaagaatgaccggcatgaatcttacgggtaaaggctgttactctgcacaggaaaattgagttttcttacaagctctgaggtctattcctcagttgcggaatcaatgacaggcatgtcgactattaatggcgaccggtggtcttacccggaaagcccagatagagttcatggcattagaggttactttgacgaggtttgcgatgtcccgcacgatccgttttcacaagtttggtccggccgaggtgctcaaatgcgaagagcatgcagccgcgcagcccgcaccgggcgaagtgcaggtgcgtgtcgaagcgattggcatcagctggtatgacattctgtggcgccagaacctggcgtcttcccacgcacgcttgccgtccggccttggccatgagatggccggggtggtggtcgccgtcggcgatggcgtggacgatttggccgtgggtgacaaagtcgcaagttttccggctgagagccccaatgattacccggtgtatggcgagcagatcgtcctgccccgttcggccttgacccgctacccggatgtcttgagcccgatcgaagccagcgttcactacacgccgctgttgattgcgtattttgcttatgtggatctggcccgggtcaagcctgggcagtttgccctggtgacagatgccagtcactgtgccggcccgtcctttgtgcaactgggcaaggccctgggtgtgcgggtgattgccgcgaccaaagacagcgcggagcgcgagtacctgctgtccctcggtgcggaaaaggtcatcgtcaccgaagagcaggacctgctcatgcaaatcaacaaattcaccgacaaccgtggtgtcgacgtggtgttcgatggcttgggtggcccgcagatgtcgttgctcggcgatgtgctggcaccgcgtggcagcctggtgctgtatggcttgcaaggcggtaaccagacgccattcccggcgtgtgcggcgttccagaagaacattcagttctttgtgcactgcattggtaacttcaccggcaaacccgaactgggcatcatccaggaccaggtggccctgcagcgcgccttgcgggatatcaaccaattgaccgccgatcgcgtgttggtgccgctgaaaaccacggtgtttcccttcagccagttcgtggaagcgcaccgctacatggacgaatgcccgtgccgcgaacgcgttgcgttgcaggttgaagctgtttagggcgtaggaagattcttaaaccagccttcctaccacccgccgcatgaggcaaatgcgccatttgacaaggctgaacctgcacagcccgccaggtacccagctggcgctttagcccatgaatccggcctttctctccggcgccgccctggaatccagcgcggcgtctttgtgtgcgcgtgattaatgcaggcgacggtggtttatctgcactggttttcggtcaggttctgtatctattaatcattatttcagcactgataattacgccttcactttcatctcaaggactgagcaatgattgaatatccgacactgcaatcgcgagtgctcgaagcagagactgctgcgcttgtgcggaatcagggaagtagatatatccaggacaatcctcaatccaataagttggaaagtttgttgttttacttgtcaggcacgtcttagattgactggttaaaggcgtgtaggaagttgtcggaacattcctaggttttcagctcggccgcgctttggcctagataaatcgaggggtggagggtttcaaggctgggctgatacccgggagtgtccgtgtcgttttgttgcgcggtgctactgtttatttagcgcctcacaaagtgatgcggaactttctatgcgtgcaatagatcgggcaaacacgctcagtagttgctcgaaactgacatttcaactcaggtagtagaacgatgagcactattcacgaacaggctatgaattatgtttaccagcaagttttgcagcgtttgatcgggcactttaatcgtgcggagcgaacagcgcttcagttgttggtccagcggattgtcgtggccgcgggaggtatggagcaggtgggagactacaaggtgttgatggcccatggtggaggcgaagtcagcagctgtaccttggcattgctgcgggctgcacagctgaccatcgccgggcgagcgccacgaaccttcaagttgcgggtggcaacattgcgccattcgggcatgaccgacagcaggctcgacagcctcaatcagggttacgggcgcttgttccttcacgatgacccgagggttgaactactgatggtggagaaccaggaagtattgcccttcaaccatcaacgcccggcctctgccatggggcgagaaaccagccagcgcaacatgctgatgatcggccacctgagctcaggtgattgccgtgccactttgtgcagcgacacgtatctggcactcggggatttctaccagcgcgtgaccacctggaatggcggggtacatgccctggtcagtggtgattccccgcgcaagcaagggcagtttctggcctggctgaagaaaaccgcccagagcgctggcgttccgatccccagcacctggccgttgtcgctcaccgggttgtttgcgcgcatggacgagtggagcaccagctactaccgcgaggtgtacggtgaacattatgtcgccagtaccaacccgagcaaggcgggtcaccgtcacttggcttacatcagcatcgccgacctgctggaggatgtggatacgcaaatgtcgccgatattgactgaattcatggcgtttgctcccgacccgcttggatttcatttcagccatcctggctactccaatcctctgatgatggctcatctgcgtggcttgcaggcccgctgcctgcgggaccttgactacgaagagggggttcaaggctttatccgccaggcctcgcagttcctgcggcgccagcacctgcccgaggcgtggctggcgcaggtgggcatcggtacagacggtgcgctaacgagtaccgccgcgcagcagttctttgggctggatgaaacacagttggtgtgcctgctgttctcgccgtttatccaccatggggagcggctggaaggctatttacgtcaatgccaccctggcatgctggtggccttgcctgagttgcataaggtcctgcagggcaagcaatcggccgatatgttgcagcagtgggtcagcgacaccagtggcctgccgatgcccttgttgcaacacctctatcgcaagcgtccggtgcccagcgcggttggtaaatcgcgcagtgcaggcgccatggcccacggcaacgcacccgcttgccaattgtccgggcgatgacactgcgcggcgagcgacaagccgacttcgcgtatcaggcggtctaccgctacatgatcaacctgatcaacgaagtcagcaccgatacccgtgtaaagctgccatcgctgcggcaattggcgaggcgcctgaacgtatcgatctcgacgattcaatacgcctactcgctgctggagaaggagggcagggtctactcggtggccaagtcgggttattacgcctggccgctttcagcaagtacggtggcaggcggtagcggcgatttgcttgaccgtctttacgcggcggcacgcagcccgtgcatggcggtgttcagcggcgatgagccggcgctgctggcgtcgctggatggggcgctgttgcgcctcgaacgggagctggtgcgccagtacccgcgtcatctgcaaccctggtcacagccgtgtggcgtatgggagctgcgtgcggcactggccgcgcggtacacctcgtcgcccacgcgttgctggcacgccgacgacatctacatcggggccgacctgcgcggggtgctggatatcctgattgaggtgctgggcctgcgggggaccacggtgatcgttgaatccccctgcgactggctgattttgcgcctgttccaggattgcgcggtgcgcatcatcgagttgccctggaccccggaagggcgcctggacctgatgacccttgaccaactgttgcgcgatgagccggtgcacctggtattgctgtcgtcgaaggtcagcctgccatcaggcaatgccctgcctgcccacgaccgcctcagcctggcacagatgctggaccggtacggttgctggctgctggaaaacgacacttttggcgagctgggtttcaaggagccccaggcggcgctgcgtgaatgggtgaacccggagcggctgatggtgttttcctcgttcgagaaaatactgggggcggaagcgccctacggctatctgttgtcacggcgcatgagcagtgaactgcagcgccagtttttgctgcgctcgttccgcttatcatcgatccgccagcgcgccatcgcccgcctttatcagagcgggcgaatagacccgcacttgcgggcgttacgccaactactgcaggcgcaagcggctgaaatgagcgggcgccttgagcagcatctggggcagcaggtgagttatcggatgccggctgccggggcggcgttctggctgggctccacccaggccgtcgacatgcgccaggtcttcaagcgcctgcttgcccagcaggtcgtgattgcaccgggcgagctgttcagtgtcagcggcctgcatcatcagcacttgcgcgtgagccatacctttcatgggcagcccaacctggagatcgccttggcggccataagcgaggccttgcgtcaggctcaaacgggatgaccgcgtgaagcttctcttactgttgtaggatcgataccgtcgcgcagcagtccaactctcagtaaactgccatttttttccgaatccttctttccgaggtttatgcatgacaatcagtccttttgcgggcaagccggcgccagcccagttgctggtggatatcccgcgactggttacggcctattacactggccagcctgatgcagcaatctccactcagcgcgtggcattcggtacgtccgggcaccgcggcagctcgttcgaactgagcttcaacgagtggcatgtgctcgccatcagccaggccatctgcctgtatcgcgaagcacaaggcatcgacggcccgctgtttgtcggcctggacacccatgcactgtcgacacctgccggagccagcgccctggaagtgctggccgccaacggcgtgcacgtgatgctcgccgaaggcgatgaatacacgccgaccccggccatctcccacgccatcatctgctacaaccgtggtcgcaccagcggcctggctgacggcatcgtcatcacgccatcgcacaacccgccgcagagtggcggctacaagtacaacccgcccaatggcggcccggccgacacccacgtgaccaagtggatcgaagccaaggccaacgagctgctcgccaacaaactggccggggtcaagcgcatcactcacgcgcaggcgctcaaggccgacactacccatcgccacgattacctcaacagctacgtggccgacctggtcaacgtgatcgacatggacgctatccgcagcgccgacctgcgcctgggcgttgacccgctgggcggagcaggggtgcgctactggtcggcgattgccgagcactaccgcttgaacctggacgtagtgaacaccgaagtcgacgcgactttccgcttcatgagcgtcgactgggacggccagatccgcatggacccgtcctccagctacgccatgcaaggcctgatcggcctcaaggaacggttcgacgtggccttcgcctgcgacccggaccatgaccgtcacggtatcgtcaccccgtccggcggcctgctggcgccgaacaactacctggccgtgtccatcgactacctgttccagaaccgtccggactggcgcgcagacgcggcggtgggcaagaccgtggtcagcagcggcttgatcgaccgcgtggcggcccgcatcggccgtcgcctttacgaagtgccggtcggcttcaaatggtttgccgatggcctgttcgaaggctcgctgggttttggcggcgaagaaagcgccggtgcctcgttcctgcgcaaggacggcacggtctggagtactgacaaggacggcctgatcccggcgttgctggcagcggaaatgacctcgcgcaaaggccaggacccgagccagatctaccgtggcctgaccgacgccctgggcgaaccgttcgcgattcgtgtggacgccaaggccacaccggcgcaaaaagccttgctgggcaagttgtcgcccgatcaggtgacctcgaccgagctggccggagaacgtatccagcagatcctcagccacgcgccgggcaacaaccaggcaatcggcggcttgaaggtgatgaccgaaaacggctggtttgccgcacggccatcgggcaccgaggatatctacaagatctacgccgagagctttatcggtgacgatcacctcaagcaactggtggaagaggcgcaggtgttggtggacggcgccatctccgactaacgctgcaatatcaatgtgggagggggcttgcccccgatagcggtgtgtcagtttgcatctctttttctgaaacacagccatcgggggcaagccccctcccacagttgattgaggtcaggccaggtctaccaggacgatttcgctgtcctcgatcgcggttacccgcaaaacctgttcattctctaccgcaacaccgtctcgcgcttgtgcacgcaagccattgacttcaatcacgcccgtcgccggcactagatacgcacgacgcccaccgtccagccggtactcgacagtttccccggctttcaggttcgctgccaccagtcgcgcatccgcacgaatacgcaggctttcattgtccccggccttgccactggccagtgtcacaaacccctcgcggtcgcctttcgggaacggcttggcgccccacgaaggcggcaaaccggcttcattcggaataatccagatctggaaaatcttcgtcggcgcatcttccaggttgtactcgctgtgagcgatcccggtgcccgcgctcatcacctgcacatcaccggcctcggtacggcccttgttgccaaggttgtcggcatggctgatcgcaccttcacgcacataagtgatgatctccatgtcgcggtgtgggtgctgcgggaagccagtgccgggcgcgatgatgtcgtcgttccacacccgcaggttgccccagtgcatacgcttgaggtcgtggtactcggcaaatgaaaagtggtgatgggcgtcaagccagccatggtgggcgccgcccagggaattgaatggtcgaagttcaagcatgatcgtctcctgtggatgggcctatgatcctgcagcccatgatcgataaaaagcgtaaaaaatgcctgattcctatcgatttaatggattggttagtggcgttttgactttcagttcatcgcctaactgcatgaccgcaaagcaattggctggaactgagagtcgattccggcgaccatggcgcacttgtcacaacccagctcaacgcaggagtccgcgtgtcgcaacaaaagcctgatcttcctcccgaactgcgccccttggctgaaatgccgctattgaagcgcttggccgcgcgcctgtttggccatggcctgacccgcttgcgcgcccagcatcggttttcctggttgcacgggcaggccgacggttttcgcagtgggcacgaggcgggcgtggagtacggttaccgtgaaggcaaggccgatggtatcgaggaaggccggcaggtcctgctgattcgtgacttccgccccgatgagcaccgagcgccgcgtgtggacgacagcctgttcgatgattggcgcctgccgctcactgccgagttgaagaagcgcatcaaggcggatgtcgcgcgattgctaccggcccatgcccagcccagcgcggcgcaatggaagatgattttcagcgatacaccttcaacctcggtgattgccggggctggcgcgggtaaatccacctcgctggtgctgcgtatcctgttgctgacccattacctgggctttgagctgagctccatgacggtggtgacctttacccgagagtcgcgcaaagacttcatcaacaagctcatggaaattctcaacctgtggggccaaccccttggtatgaaagaagcgcaggccgtggtgcgtacctttcattcgcgcattctgccgatggtgcgcagcctgccgggctttgaacgcctgcaagcgttcgaaaacctcaactcgggcttcgaagacgccgacagcaacccctttgacctgcgcatcaacgatgcccagcgccagcaaatgaatgcctgttatcaccacctgcatgggcggcacccacgctttcgcgagttgattgcgccgctggcacgccatggcctgcagctcaaggaactggagcgtgatcatcctgacgtgcaaaagcgcgtagcggtgaccgaactggcagccaagcgtgatgaagagctgtgtgatgtaatcgaggacctgtggtttcgcgccggtgcctggccgatcaagggcatcgagcccaatcgccagaccgtggagatcaatggcgcgcaatttcactgccatggctatatccccgaactggacgcctgggtcgtactgggcttcgactcgcgggaaaatgcccagctcagccggcccaacgcgaaactgccagtgcgcgcagaatgggcggtaaaacgcactttgtttcaagctttctgtcgtaagccattgatatggatagacagttatgaatcctcaaggcgtctgttgagtagcttggcaggggatgccactgctgggccaggcttcgattacaaggtcacaggcgagctggcttcggcgccgttgctggacagtttcgtgatggcggccgggtttatcgagaaccttgggctggatgtacccaccgcggttgggcagatgagctttgccaaggatgacccggaccgcttcttcttcgaagccctgagcattttctggaaggccctggaagatcacctgctggaccagtcgccgccgatcatgacctacaaccgcatgttctcgctgttcggcgagaacaccccggaaaacctcaagctgctcagcgacccgctgttacggccgctgtcgcacctgatgatcgacgagttccaggacgtttcgccacagatcgtctcgtggatccgtgccagcctgcgcgagatccgcagccgtggcccggccatgcacgtcgggcgcggcgcccagcattcatcactgttgtgtgtgggggatgactggcagtcgatctacggctggcgtgggagttcgtccaagtacttcatggaattcaacacggagttcccatcgcctgccaccacccgagtgatgctgggcgagaactatcgcagtcaccagtacatcatcgacgcggccgagcatatcgtgcgcgccgcacccgccatccccggcaagaaggccaaggccagcggggcgcccaaggctttggtgccggtcatggtgctggaacgggacgatgcggcattgggacggcaattgctggagcattaccagcgcggcgaatcagtgctaatgctctatcgaaaaagtagcgataaattactgattcaagagcatattcagtcaatagttaatgtggattctagcttgccgcctccggcgcgcaggctgaaacaattgacctaccacagcgccaaggggctgcaggccgatgcggtattcctgcttggggattgccagcatgtcacccgttcgccgtataaaaaccaggtgtaccgcatggcgggcctgggcaaggacggggacagcgagccgtacgacaacgcgcagaaggacgagatcttgcgcctggcgtatgtgggcatcacgcgggcggtgagtcattgctactggtacgtggaaaagcccgaaggccaggcagtcaatgtgcccaaggcgtcggagcgggtagatggcaggaaagcgttttttgatgatcagcgcttttaggcgctgatcacttcaggcccgcagggactgcggcggcacaaacgactccaactcgtcctccaccgcctcgatgatccgctccacatcggcggcattcatcaccgtggcgcaggggatgccggcgatggcgatcaacgtctcgccgctggcccggtcgaacaggcgggcgatcatgctgccgggcgcgtccatgctgccctcgaagcccatcggatggaaatgccagcgcatcagctggcaggcgttggggaacgtcactttattcatgttgcccaccttgttcattgagcgcttcctttagctcgcggcagggggccagaccttcactggtcgtggcggtgtagagcttaaaaatagcattcgttcgtcaccgcaaggtgactttttcggccccgttcggcggttgttttccataaggttgatgtgggtcatgtcctacttgggattgggcaaaaggccattagtcggaaacgtcaattggccattgaagcacccacagaaattcggcaatctccagggtttacccgccgcagagccgtccatgcccgacatcgctgcagacgatgaatgccagcaatcccacgccacgcgagagttggtgttacgccatcacctctgctggcgccaccgggacctggaaggcgtgatgtcctactaccacccggacatccaataccacgactttttccagaaccgagtcgtcggtttcgccgacttgcgcgattacctgcaagccagcatgccccgtgaggctgacgaagcgatcgagcacagcgaccgtatccgtgccgacggcgataccgcgttcatccagtaccgcatcaccttgcggggcagccagggcctggtgtcattccgcaccagcgaagccattacggtgcgcgacggactgatctggcgggtcaacgaatacgcgtccctggtgcacgagcagccggcccaggccgcacggccctctgtcagccgcctgggcctgtcgccccagcaattggggcatatggccaatgacctgcaacagtatttcgaacgcaagcaaccttacctggacccggagctggacctgcaacgggtggccaaggagtgcggctacagccgcaatcaaatttcctacctgctgaaccaggtgctggggcaaagcttctaccgctacgtcaaccaggcaaggctccagcatttactggccgcgctggatcaggccgtaccgccgatcaaggtcgatgacctggcgtttgccgccggtttcaattcgctgtcggcgttctacagcgcgttccgccagcatacgggccagtcgcccaaggcctacgtcaaacaaatttctctgcgtgcacgcgcgcaagacagcccataacacggcgctctaggatcaaccctatcgaaacgaggtaggggaacctggcatgccggcatggcgcaacatcagtttatggatggaccagttggacgacccgctgcaggcgcggccgacgctggagcatgacctggacgtcaacgtggccattatcggcgccggttacaccgggctgtggaccgcgtactacctgaaacgccaggctcctgagctgaaaatcgccatcatcgaagcgcaaacggccggtttcggtgcatctggccgtaatggcggctggctgatgggtaatctgctgggtgaggaccgcttgctcgccggcctgaatcccgaacaacgtcgcgcttcgtttgacctgctgcacgccatccccgatgaagtggcccaggtgctggcacgtgaaggcatcgactgcgactaccgcaagggcggcgccttgtactgtgccgcgcgctaccccgagcaggaaggcagcctgcgccgctatttggacaaactctacgcccaaggcctgaccgaagacgactaccgctggctcgccccgcagcagttggccgagcaaatccgcatcgccaagccctatggcggcatttacgcgccccatgtcgcaaccatcaacccggccaagctggtgcgtggcctggcgcgggtggtcgagagcatgggcgtgatgatctacgaaaacagcccggtcacccactggcaatccggcagcctgcgtaccgcaaaggccggtgtgcgggcggcctgggtggtgccggcggtggagggctatgccaccaccttgccgccgctgggtcgctaccagctgccggtgcaaagcctgatcgtcgccaccgagccgttacccgccagcacctgggatgagatcggcctgagccatggccaggcctttggtgaaagcagtcgccaggtcacctacggtcagcgttcggcggataaccgcctggtattcggcgcgcgcggcggttaccaattcgccgggaagctacgccacgacttcgatttgaccgacagcgaagtggagctgcgtcgctatctgttcggcgagctgttcccacagctcaagaacgtcaggattacccattcctggggcggcaacctgggcatgtcgcgcaatttccgtccgcacatgctctgcgaccacaagacaggcatcgcgctgtccggcggttacggcggggagggcgttggcgcgaccaacctgggcggccgcaccctggccgacctgatcctgggccgcgacacgttgttgacccatcagccctgggtcatccgcgaacgcggcctggacgcgctcaaaccctgggaacccgaaccctgccgctggctgggctacaacgcgatcattcgcagtttcgtccatgaagaccaggtactggccaaccccaataccgccccttggcgccgcaaactggcggccggtgtggccgggttcatggaaggtttcatgcactaagtcgtttcattcacacgggaaaacccatgagcatcactcagttcaaagacacgctgaacgcccacctgccggactcgtcgcccgtcgccgtgcccttgggtgagcccattgccattgcgtcgaccctgagcgtcgagcgcaacgacggcgtcgagaccggcatctgggagtgcaccccaggccgttggcgtcggcagatcaactcccaggagttctgccactttatccagggccgctgcaccttcaccccggataacggtgaagtcgtccacatacaagccggtgatgcactgatgttgccggccaacagcaccggcatctgggacatccaggagaccgtgcgcaagacctatgtattgatcctgtaacgctttgatccttgatcgcctgccataaaaacagccctaaaaccgccaggaaatcgaaccatgaaagccattgccctgttgcccttgatgttggtggcctctgtcagccaggccaccgagacggtaaaaatctacaactggtcggactacatcgcgccggataccaccaagaacttccagaaagaaaccggcatcggtttcacctacgacgtgtacgacagcaatgaaaccctcgacggcaagttgatgaccggtaaatccggctacgacgtggtgttcccgtccaaccatttcatggcccggcagatccagggcggggcattgaagaagctcgacaagagccagttgcccaattggaagaacctcaacccggtactgctcaaggccctggaaaacaacgacccgggcaatgcccatggtttcccgtacctgtggggcagcaccggcatcggctacaacatcgacaaggtcaaggccgtgctgggtgacaacgcgccggtggattcctgggacctgatcttcaagccggaaaacatggccaagctgcagaaatgcggggtggcgatcctcgacaacggcccggaactgctgccggccgcgctcaactacctgggcttgccgcaccacagcaagaaacccgaggactacaagaaggctgaagacctgctgatgaaagtgcgaccttacgtggcgtacttccactcctcgaaatacaccgccgacctggccaacggtgatatctgcgtggccgttggcttctccggcgacatcctgcaagccgaaagccgcgccaaagaggccaagaacggcgtgaacatcggctacaacatccccaaggaaggcgccgccatctggttcgacatggtcgccatgcccgccgatgcaccggatgaaaaagccggctacgcgttcatgaactacctgctgcgtccggacgtgatggccagcatcaccaactacgtgcactacgccaatggcaaccaggccgccgacagcctggtggacccggcgatcaaggccgataccaaggtgtacccaagcccggcaatgatgggcaaattgtttgcgctggaagcgatgccactgaatatcgaccgtgtgcgtacgcgggtgtggaacaccgtccgtaccggccgctgaaattccgtggtgagcgggcttgtcccgcgctgggctgcgaagcggccctaattccagcacccggtaggtgtggcaggccgcctatggacccgtccttcactgcaggcgcggtccatagagtttctagcgattaaaaccgatttcttagactgtcatttctgacaggttttatgtttggacaaatgacttaagctcctgatgcctactagtcatcaaatggaaaaaggagtttttatgccaaacgtccctgatatcgtcctgccgaaaatctacccgttcggtagcatggtgggtgcggtaaccactggcggtgtgccgagtattttcatagcgacatcggtctatcgcgacgaacaaggtggaaatattcgatttattggccgaatggaaggttcagatccgctagcgccagcaatcatccaagtcgagattaaggatcgtgacacgccaagcggtacttacacattagcggacaaagtcttgagggttatttacgtcccgcatggctcgactgcgggccgccttgcagtcagtgccgaggtgctgtttattcgctccggtccgattgactggattcgaggacgtgtggaggctgaaaccccgcagggtgatgtgatagacgttgtgtactctatcttcggaatgggttgaaaggcttgaaaccgacagggcggttttctgaagtcgacttcagatcgccgctctttaccgggtagtgatatccgcattcacggattctccagatcatgccccaacgactggataaacaacgaaaacagctccggctgtgacgagatatccagcttggcgtacaagtgtcgacggtgcaccttcaccgtgtccggcgagatgttcaggcgttcggccatggccttggacgagaacccgcgcagcaccaggcgagcgatttccagttcgcggtccgagagcacaccacagccgaattgactcagcgcgtcccggatctggctacccatcgccggcgtacgctgggtactctgctgccagtgctgctgcatcagcggcaacacccaggctgccaccgtggtcatcaacccggtctcctcaaagctgaagcgccgctgcatgcccagcgacagcgacagcgtgcccgcgcccggcagttgcaggatgaattgcacctcgtcttccagaacgttgtcatggaagtaattgaggaagtactcactctggcgaaaatgatccggcgccacttcctccaggcggtacaccccgctggcatacccctcgcgacaggcctggaagaacgggtcgagcaaatacaagccgttgaggtacaccagcatcgacgccggcttgctgctgggctgggcgtcgtattcttccagggcctggggtggcccttccaaggggtagaagatcgccagggcgttatcgaagggcaggcattggtgcagcaacagcaccaactgcttccagaaacgctcggtgccgatgtgctcaacggtgcggcccaggccggcgtgcatcccaacctcgcgaaacaggctcatgtgacaggctcccgccggcaaaaagatcggccaagggttcggcttttgccgggtggcgtcaaggggagtacgccaataggggaattggccgacatgccctcacgtattaacgtccgcatcattcagcgggaaacatatcccgtgacttatcagatttttcgtttctgcctcataccaagaacaacgacagaggataacgatatgagcacttcccccacgcccgaaggcgtgctgaaacccaccttgagtgtgttcgatgtggtcgccattaccgtatcagcggtgacgccggccagttccgtgtttgtgatcgcaccgtttgccatccagcaggccggcagcggagtgttcctggcgttcgtgatggccggtctgctcgcgctgatgtttgcgttttgctacgccgaactgggccgtgctcacaacagcgccggtggcgaatatgtatacgccaagcgcgtgttcggcggcatggcgggctacgcgacattcctgaccgtgctggtgatgttgctgtttatcccgccggtactggctacgggcgcggcaacgtatctgaataacgccctgggcacgaagtttgattcgcagacggtggccctggtgatcgtggtgtgcagctacgccctgggcatcctcaatatcaagctcaacgcctggatcaccggcacctgcctgttgctggaagtcgcagcgctgctggtgatcgtggtgatcggcttcggcaacccggtgcaaccggccagcgtgctgttccagccgcagatcgtcgaaaacggcgtgttgcacctggcgccttgggccctggtgatcggcgcggtgggcatcggcctgttttcctacaacggctacggcccggcggtgttgctcgccgaagacatgaaatgcggcggcaaaggcgtgcacaaggcggtgttgtggtcgctggggttggtggtgatcatcgagttggtgccgatcatcgccctgttgatcggcgcgccgtccctgagcgcgatgatcagcagcccggaccccatcggctacctgctgaccagccatggcaatgaaaccctgtcgcgcctggtcagcgccgggatcttcctgtcggtgttcaacgccattgtcgccatcgtgatccagatcggccgcgtggtgttcagcagcgggcgcgatgcgctgtggacgccgggcatcaacaagctgttcacgcgcattcacccgcgctgggattcgccgtggttggctacgctgttcctggcgatcccatcggcgctgctgagtttcagctccaacctggccgacctgacgtcgttcagcgtattgctgatcatgctggtgtacctggtggtggcgttgagcgcgttgatgagccgggtgctgctgcgtgatcgcgagcatccctatcgcatgccgctgtggccgttgccggcgttggtggcggtgctgggcgcgggctatttgttaatgaccttgatcgtggcggcctcggtccgcgacatcctgatcatcctcggcctgctggccctgtcggtgatcctgtattgcatcagtggccggttgagtccggtcttccagaaattgtaaggagtagttatgcgcgcacgtcaattgggcatcacgttggggctgggcacgcccggtgagtggaacgccatcactgatgtgccgggggtacgggtcgggcacagcacgctcaagacccgtatcgatggcaagcaggtgcgcaccggcgtcagcgtgatccagccgcgcgcgggggaggctcgcctgcaaccgtgctttgccgggtaccacgtgctcaatggcaacggtgacgccaccggcctggaatgggtcagcgaagcggggctgctgaccacgccgctggccatcaccaacacccacagcatcggcatcgtgcgcgacagcctgatcgccctggaacgcgaacgcctggcggacccggcggtgtattggtgcatgccggtggtgatggaaacctatgacggcctgctcaacgatatctggggccagcacgtggggcccgagcatgtgcgcgaagcggtggacaacgccgaaaccggcccggtgcaggagggcgcggtcggcggaggcaccggcatgatctgccacgagttcaagggcggcatcggtacatcctcgcggcgcctgccggcggagcagggcggctggaccgttggcgtgctggtgcaggccaaccacggcaagcgccaggaactgcgggtggacggctacccggtggggcgccgcctgatggacattgcgtcgccgttcgcagagcaaggtacgccgggcatgggttcgattgtggtgatcatcgccacggacgcgccgttgctgccgcaccagtgccagcgcctggcacaacgtgcatccatcggcatcgcccgcaccggcggcggcaccgaggactccagcggcgatctgttcctggcgtttgccacgggtaaccaggatttgccgccggcggattacgggcgcaagggcctgccgttcagcagtgcattgcagatggtcaacaacgaccatatttcgccgctgttcagcgcggcggcggaggccgttgaggaggcaatcatcaatgcgatgctggccggggaggacatgctcaccgatcaaggtgcgcgcgtgccgggcctggacgccgacacgctgttggcggcattgcacaacaccggctggagtgtgtcccggaaataggggacacactaacttattactataaatagtggctgtttaatgttgccaatggcaccgtggcaatatattggatccattaatagcgaatgccgctcaacttgagcggcattagtgctatttaatatttaaataccgttgcggtgttttttgtcggacaacagcggtactccccaataaacagggagcggaacttacacggagtgtttgcctggggttttttagtgctggaaaagatgtagacgaaagatttcaagttgtgtcagttttcttacgccttcaaaagaggcgagtgataggacgatctcgcccgcggggttcctatcgatcaaagactgatgcacttgcaaacaaggaagtacgtttatgtcaaaagtaaaagacaaggctatcgtgtcggcggcgcaagccagcaccgcttactcgcaaatcgataccttcagccatctgtatgaccgtggcggcaacctcacgatcaatggcaaaccctcctataccgttgaccaggcggccacccagctgctgcgcgacggcgccgcgtaccgggactttgacggcaacggcaagatcgacctgacctacaccttcctgacctcggcctcctcgagcaccatgaacaaacatggcatcgcaggcttcagccagttcaatgcccagcagaaagcacaggccgtactggccatgcaatcctgggcggacgtggccaacgtcaccttcaccgagaaagccaccggcggtgatggccacatgaccttcggcaactacagcagcggccaggacggcgcggcagccttcgcctacctgcccggcactggcgcaggctacgacggcacctcgtggtacttgaccaacaacagctacacgccgaacaagaccccggacctgaacaactacggccggcagacccttactcacgaaatcggccacaccctgggcctggcccaccccggcgactacaacgccgggaacggcaacccgacctacaacgacgcgacctatggacaggacacgcgcggctacagcctgatgagctactggagcgagagcaacaccaaccagaacttcagcaagggtggggtcgaggcgtacgcgtctgctccactgatcgacgacatcgcggcgatccagaagctttacggcgccaactacaacacccgtgccggcgacaccacctacggcttcaactccaacaccgggcgtgacttctacagcgccacctccaatgccgacaagctggtgttctcggtgtgggacggcggtggcaacgacaccctggacttctccggttttacccaaaaccagaagatcaacctcaatgaagcctcgttctccgacgtgggcggcctggtgggcaacgtgtccatcgccaagggcgtgaccgtcgagaacgccttcggtggcgccggcaacgatttgatcatcggcaataacgcggccaacgtgatcaagggcggtgccggcaacgacatcatctacggcggcggcggggcagaccagctgtggggcggcgcgggcaacgacacctttgtgttcggtgccagctccgattccaagccgggcgcggcggacaagatctttgactttacctccggttccgacaagatcgacctgtctggtatcaccaagggcgcaggcctgaccttcgtcaatgcctttaccgggcatgccggcgatgcggtcctcacctacgccgcaggtaccaacctgggcactctggcagtggacttctccgggcacggcgtggcggacttcctcgtcaccaccgtcggccaggctgcggtcagcgacatcgtggcgtgatgcacgggcgcggcgcttcggcgccgcgccttacggatggagcatgaagatgcggcgtatgtttaatctgatcgcctgcgtgctgcaggtgatgttcgtgtcggcaggagcccacgcaatggcaagcagtctcgtattacctacctccgcccagttggccgggcattggcagttgcaccagcaggaccaggtctgcgcgctggacttgctggaacaggccaatgccttgggcggcgatgtggcgtgtgtcgccaactggttgggcgacaagcccctgacctggacgccaacgccggatggtatctggctgatgaatgccgaaggcagtggcattactcacctcaaccggcagaaagaaggtgaatataaaggccgcacgccgacgggcctcgaagttgtactgcaacgcgcaccttagttgccgttataagtaaataacttgatttcattagttgaccgctccgttagccggggctggggcaactattgcgcgcaattgggttcagggaagatcagaagctatggcgaagtcccatgccgtcgcgccgttattcaaggcgctgggtgagtacaagagtattttgatcagcattggctgtttcacggcattgattaacctgctgatgctggtgccgtcgatttatatgctgcaagtgtatgaccgcgtgctgtcctcccagaatgaaaccaccctggtgatgctgacgctgatggtcgtgggcttctttgcctttatcggcctgctggaggtgatccgcagttttatcgtgatccgcatcggcagccaactggagcggcgtttcaacttgcgcgtgtacaaggcggcgtttgaacgcaacctgcaacgcggccaggggcacgccgggcaatccctgggggatttgacccatatccgccaattcatcacggggccggcgctgttcgcattttttgatgcgccgtggtttcccatctacctgtttgtgatttttttgttcaacgtctggttgggtgtgcttgctacggtcggcgccgtgctgctgatcggcctggcatgcctgaatgaatacctgaccaaaaagccgttgggcgaagccagcggctactcccagcaatccacgcaactggccaccagccacttgcacaatgccgagaccatccaggccatgggcatgctcggcgcactgcgcactcgctggttcgcgctgcattctcagtttctcggcttgcagaacaaggccagtgacaccggttcggtgatcacctccctgagcaaatccctgcgcctgtgcctgcaatcattggtgctcggcctgggggccttgctggtgatcaagggcgatatgactgccgggatgatgatcgccggctccatcctgatgggccgggtgctcagccccatcgaccagttgattgcggtgtggaagcaatggagtgcggccaagctggcctatcagcgcctggacgacttgttgcgcgagtttcccccggaggtcgagcagatgaagctgccggcgcccaagggccaggtcagctttgaacaggtcagcgccggcccgcccggacggcgtatggcgaccttgcatcaggtcagcttcaacctcggcgccggcgaagtgctcggtgtgctcggggcatcgggctccggcaaatccaccctggcccgggtgctggtgggcgtatggccgacactcgctggcacggtgcgcctggatggcgccgacatccatcgctgggaccgcgacgacctcggcccgcacatcggctacctgccccaggacatcgagctgttcagcggtagcatcgctgacaacatcgcacgctttcgcgaagccgaccccgagcaggtggtgcgtgccgcgcagcaggccggtgtgcatgaactgatcctgcgtttaccccagggctacgacacggtgcttggggacaacggcggcggcctgtccggcggccagaagcaacgggtggccctggcccgcgccctgtacggcgggccgcgcctgatcgtgctggatgagcccaactccaacctcgacaccgtgggcgaagccgccctggccagcgccatcgtgcagatgaaagcccagggcagcagcgtggtgctggtgacccatcgttcgtcggcgctggcccaggccgacaagttgctggtgctcagcgacggtcatttgcaagcgttcgggccgagccaggaggtgctgcgcgcattgtcgggccagccggaaacgcccaaggacaaaccgggcgtgagtttcagtcgtcagtaccaggccacaaggaatccaggcgcatgagcagcatcacggttgaaccacgcttcaaagagcacgacgccaggtttttcgcgcgcatggggtggttgctgaccgtggtcggcgccggcgggtttttcctgtgggccagcctcgcgcccttggaccagggcatcccggtacagggtacggtggtggtgtcgggcaagcgcaaggccgtacaaaccctcagcccgggcgtcgtcagccggattctggtaaaggagggcgagcatgtgaaacaaggccaggcgctgttccgtctcgaccagacccagcaccaggccgacgtgcaatccctgcaagcccagtaccgcatggcctgggccagcgtggcgcgctggcagagcgagcgcgacaacctcgccagcatcgcatttcccaccgaactcagtgccgctcccgaccccgccctggcgttggtgctggaaggccagcgccaattgttcagcagccgtcgcgaagcctttgcccgcgagcaggccggcattcgcgccaatatcgagggcgcgaccgcacaactgggcggtatgcgccgtgcgcgcactgacctgaccgcccaggcgcaatccctgcgtgaccaactgagcaacctgcaacccctggccgacaacggctacatcccgcgcaaccggctgatggagtaccagcggcagttgtcccaggtgcaacaggacttggcgcagaacactggcgaaagtggccgtgtggaacagggcattctcgaatcgcgcctcaagctgcaacaacacagtgaggaatatcaaaaagaggtacgcagccagctggccgatgcgcaactgcgcagcctgaccctggaacagcaactcacttcggccgggttcgacctgcaacacagcgaaatcaacgccccggcggatggcatcgcggtcaatctcagcgtgcacaccgaaggcgcagtggtccgcgccggtgaaaccctgctggaagtcgtgccccagggcacgcgcctggaagtggaagggcacctgccggtgcacctggtggacaaggttggcacgcacctgccggtggacatcctgttcaccgccttcaaccaaagccgtacgccccgggtgccgggcgaggtcagcctgatttccgccgaccagatgctcgatgaaaagaccggcgcgccttattacgtgctacgcaccacggtcagcgaagcggccttggaaaaactccacggcctggtgatcaagccgggcatgcccgccgagatgttcgtgcgcaccggcgagcgttcgttgctcaattacctgttcaagccgctgctcgaccgcgccggctcggcgttgaccgaggaatgaacatgaaaccggtgtttatggccttgctgttcacctgcgcgagtgcccaggcggccatggggccgttcgatgtgtacgagcaggccctgcgtaacgatccggtgtttctcggcgcgatcaaggagcgcgacgccggcctggaaaaccgcgccatcggccgcgccggcctgctgcccaagctgtcgtacaactacaacaaaggccgtaacaactcccaggccaccttgccggacgggcgcggtggcaactaccacgacgaccgcaactacaacagctacggctccaccttcagcctgcaacagccgctgttcgactacgaggcctacgccaattaccgcaagggcgtggcccaggcgttgtttgccgatgaaagctttcgtgacaagagtcaggcgttgctggtgcgggtgctgacctactacacccaggccttgttcgcccaggaccagatcgacatcgcccgcgccaagaagaaggccttcgagcaacagttccagcagaaccggcacttgttccaacagggcgagggcactcgcacggacattctggaagccgaatcgcgctacgagctggccaccgccgaagagatccaggcgctggatgaacaggacgcgtccttgcgcgagctgggcgccttgatcggcgtacagagcgtcgacatccacgacctggcgccactgaaccaaggttttgccgcgttcaccctgaccccggccaactacgacacctggcatgagctggcgatcagcaacaaccccacgctggcctcccagcgccaagccctggaagtggcgcgttatgaggtagaacgcaaccgcgccgggcatctgcccaaggtcacggcctatgccagttcgcgtcaacaggagtccgacagcggcaacacctacaaccagcgctacgacaccaacaccatcggcgtcgaagtcagcctgccgctgtatgccggtggcggcatctcggcctctacccgccaggccagccgcgccatggagcaggccgagtacgagcttgagggcaagacccgcgaaaccctgatcgaactgcgccgccagttcagcgcctgcctgtcgggggtgagcaaattgcgcgcgtaccagaaggccctggtgtcggctgaggcgctggtggtgtcgaccaggcaaagcatcctcggtggcgagcgggtcaacctcgacgcattgaacgccgagcagcagctctacagcacccggcgcgatctggcccaggcgcggtatgactacctgatggcctggaccaagttgcattactacgcgggcaatctgcgcgataccgatttggccaaagtggatgaggcgttcggccctgcaaggggtgtaaatcaataataagaggggtaataccatgggtatctttgactacaaaaacctcggcaccgagggttccaaggcgttgttcgccgatgcgatggcgatcacgttgtacagctatcacaacctggataacggctttgccgtggggtaccagcacaatggcctggggctgggcttgccggcaacattggtcggcgcgttgctcggcagcaccgattcacagggcgttatccccggcattccgtggaacccggattcggaaaaagccgccctggaagcagtgcaaaaggccggttggacgccgctcagcgccagtgccctgggctacggcggcaaggtcgatgcgcgaggtaccttcttcggcgaaaaggccggctacaccacggcccaggtcgaggtgctgggcaagtacgatgatgccggcaagctgctggaaatcggcattggctttcgcggcacctccggaccacgggaaaccctgatcagcgattctatcggcgatctggtcagcgacttgctcgcggccctggggcccaaggactatgcgaagaactacgccggcgaagccttcggtggtttgctcaaaaatgtcgccgactacgccagcgcccatggcctgagcggcaaggatgtggtggtcagtgggcatagcctgggtgggttggcggtcaacagcatggccgacctgagcaacagtaaatggtccggcttctacaaggacgccaactacgtggcctatgcctcgccgacccagagtgccggcgacaaggtgctcaatatcggctacgaaaacgacccagtgttccgggccctggatggctcgtccttcaacctgtcgtccctgggcgtgcacgacacaccccatgcgtcgactaccgacaacatcgtcagcttcaacgaccactatgcgtcgacgctgtggaatgtgatgccgttttccatcgtcaacctgccgacctggatctcgcacctgcccaccggctatggcgatggcatgacgcgcatcctggagtcgggcttctacgagcagatgacccgcgattccacggtgatcgtggccaacctgtccgacccggcacgggccaacacctgggtgcaggacctcaaccgcaatgccgagccgcacaaaggcgataccttcatcatcggcagcgacggcaatgacctgatccagggcggcaagggcgtggactttatcgaggggggcaagggtaatgacaccattcgcgacaacagtgggcacaacaccttcctgttcagcggcaacttcggtaacgatcgggtgatcggctatcagcccacggacaagttggtgttcaaggatgtggcaggcagcgccgacttgcgtgaccatgcaaaagtggtcggcgcggatacggtgctcacctttggcgccgactcagtgaccttggtcggcatcgggcaaggcggcctctgggcggacggtgtgagtatcgggtgaatgatgcttatggcgttcagccagccaatcccccaggaaggcctggggtatcggctgaatgcagcggcgtggaaaatccttcggtaaataaatatctacctggttgtcgcgacggatcgctcggtgtgcctgcgtttaacgatcaagcgagccgtttcgcgtgatgacgtgggaggaaccgagcatgtgccgattgcgattgttgctgtgcgccctggtactgctggggttggctgggtgtgcggtgtacccggcgtattcgggcccgtgctgctatcacccgtactaccactcgtactattaccatccctactatcacccgtattaccacccgtattaccggtattgaccgggcgacaatgcaaaaaaagccccgcactgcggggcttttcattgttatttttctttgatcaccgtcgcgacatcggcagccttgacccgtacccgcttaccggcgatgtcggtgaattcgtagaagccatcggcggtcttggcgtttggggtgtccttggtcaaatactgcgtgccattttgcagtgtcactacggtttgcgtcgcgcaaccggccaataccagaaaagtgagtgcaaccagcggcagacccaaattcttcatgttcataacccttaccttgactttgaaaagtcccgcgccagaggcggcgggcgacaaatgttacgccatcgattctcccatctgatcgcttttatacaaaaagttgcaggcgccatttatctattaccgattgcaacaccgcatttggagcggcactctgtatgcataaccagtattcgatcagcgcgtgaaatggccaatcccctcgacgatcccctgtattacctgcataacttccgccaagtgctgctctggctggggcagcgctatgccgatttgctcgacccggacgaacagcgttttattcagcaatttgacaggttgccgcaggcgtcccaggcgcttttggtgcgcatggtgatgcgcaagggcgtgcactttcgtgcgggcaagctcaattacctggagattggttgcccccacgccgctgccgggccgctgatggaactgggttgggtggacgatcagtacctgctggcctttgaagagctgttcgccgtgctgcaaaaaggtgaaatcctggccactttcaaaccctggatcgagcagcccaaaggcaagaaaaccgattggctggaagggttgtcggcacaattcaccgacagccgcagctttgccacctggtgccccgacctggccgacaggttgttcagcctcaccgtgatggaactctgcgaccgtctgcgcctgatgttcttcggcaacctgcatcaggactggtccgagttcgtgttggctgacctgggcatctacacctatgaaaaagtccagttctgcgccgaatcccgtggtttgcgccaccgtgacgatgtgcaggggtatctgttcctgcaccaatgccagcaggcgtacgaggccggtgagccgctggaagatgtactggccggggttgccacgctggacaccgataacccctggctggagaaacgccgcgccaagttgttgtttcagatgggtcaatattgcgagcgtactgccgagctggccctggcggagcggatttaccggaactgcacctaccccggtgcccgctcacggttgatccgcgtgctcgagcgccaggaggattacgcccacgccatggccctggcgaacaccgcccaacaggcgccggaaagcgccgccgaacagcagcacttgctgcgcgtcatcccgcgcctgcgccgcaaactcggcgagccggcattgcccaaggtcaagccacgaccgttgacgcgcctggacctggccctcacgctgccggaacccttgatgtcggtggagtactgcgtgcaggcgcacctcagcgagccggatgggccggtgcactacgtggaaaacggcctgatcaattcgctgttcggcctgctgtgctgggaggtgatttttgcgccgctgccgggttcgttcttccacccgttccagcgcggccctgccgacctgcacagcgcggattttcaccagcgccgagcgccgctgttcgacgcgtgtttcgagcagctgcaggacgagcgctacaaaaccactatccgccaacgctaccgcgacaaatggggcatccagtcgcccttcgtgttctggaacctgctcagcgaagagctgctggagcaggcgctggcctgtttgcccgccgagcacctgcgctactggttcgagcggctgctgctggacatccgcgccaaccgcgccggcatgcccgacctgatccagttctggcccgcgcaaaagacctaccgcatgatcgaggtgaaaggccccggcgatcgcctgcaagacaaccagctgcgctggctggagttctgcggcgagtaccagatgccggtgacggtctgctatgtgcgctgggcaccacccgcttgagctacaccgtggcggtgcgggcgctgtgcgaattcacggccaaggtcggtgacctcgacctgcgcttcacgccgtcgccgagcgcccaggagggcatcgccggccaccgcaccgtggcctcgcggcgcagccagcactaccagaatgaagtggcgctggagggtcaataccagcagctcacggtgcggggcagggcggatggctatgacccggacgccaatcgcctggaagaagtgaagacctatcgtggtgacctcgatgcgcagcccgccaaccatcggcaattgcactgggctcaggtcaaggtgtatggctggttgatgtgccagaaactcgggctcccggacatcgacctggcgctggtgtacttcgatatcgtcggtgagggcgagacgctgctcaatcaacgcttcgacgccagcgacctggaagcgttcttcaaccagcaatgcgcgctgttcctcggctgggccgagcaggaaatgcggcaccgtgaagcgcgcaacgccgccgcgcaaaccctggcgttcccccatgcggattttcgccctggccagcgttcactggccgagtcggtgtacaaggcggtcagcaccggccgctgcctgatggcccaggcaccgaccggcatcggcaagaccatcggcacgattttcccgttgctcaaggccctggcgccccagcaactggacacgctgttcttcctcaccgccaagacccccggccgcaaactcgccctggacgccgcccaagtgttgtatgccagccgccctggcttgccactgcgcgtgctggaactggtggcgcgggacaaagcctgcgagcacctggacaaagcctgtcacggcgagtcctgcccgttggccaaggacttctacgaccgcttgcccgccgcgcgcatcgccgcgtccagggtgcgcctgctcgatcagcgcaacctgcgtgacgtggccctggcccatcaggtctgtccgtactacctgagccaggaaatggcgcgctgggccgacctggtggtcgccgactacaactactactttgactttggcgccatgctgttcagcctggcccagctcaaccaatggcgcgcggcggtgctggtggacgaggcgcacaacctggtcgaacgggcgcgttcgatgtacagcgccagcctcgaccagtaccacctcaagaccctgcgtgacagcgccccggagccgttgaagaaacccttgcagcgcctcaaccgtgagtggaacgcgctgcacaaggaccagctcgcgccgtaccaggcctacgccgtccgcccggacaaactgctgcaggccctgagcctgtgcgccagcgccatgggcgaatacttcaacgagcatccggagtccctcagcggcgacctgcaaaccttctatttcgacgtgctgcaatttgccaaggtggcggagctgttcaacgagcacttcattttcgacatcagcaagcgccagctcagcggcaaacgcagcagttccacgctgtgcctgcgcaatgtggtgcccgccgaattcatccgcccacgattgacggctgcccgcagcagcgtgctgttttccgcgaccctgagcccccggcattactacgccgacctgctgggcctgccggccgacaccgcatgggtcgacgtggaatcaccgttcaaggccgagcaattgcaggtgcgcatcgtcgatgaaatctccacgcgcttcgtgcatcgccacgcttcgctggagcctatcgtcgagctgattgcgcaccagtacacgcaacaaccgggcaactacctggcgtttttctcaagcttcgattacctgcaacaggtcgcgcagctgctggccgagcgacatccgcagatcgtgctgtggcagcagtcacgcggcatggccgaggccgagcgccaggcgttcctcgaccagttcaccgagcacagccagggcatcggttttgccgtgctgggcggcgcttttggcgagggcatcgatctgccgggggcacgcttgatcggtgcgttcattgccaccctcgggttgccgcaactgaacccggtgaatgaacagatgaaactgcgcatgggtgcgatcttcggcgcgggctacgactacacctacctgtatcccggcctgcagaaggtggtgcaggcggcgggccgggtgatccgcagccagcaggaccggggcgtggtgatgctgatcgatgaccgtttcggagaaggccgggtacgccagttgttgccgcgctggtgggcgctggcgtgagttattcctgctatcaatgatgctggcgccgtggccggcaatcgcgcacgctggcaaaaacctggaagaaggcgatgcccatgagccagcagatcatcagcgtcaacggtattgagttgagtgtccacattgtcggccctgagcagggcacgccgatctggctgctgcacggtttcccggagtgctggcactcctggcgcgagcagattcccgcgctggcggcggcgggctatcgggtatttgccccgcaaatgcgtggctacggccattccagcgcaccggccgaggtggctgattacgacgtgctgacgctatgcggcgatatccagcaggccatggaccactttggtcattcccaggtggtgatggtcggccacgactggggcgcggtggtggcctggcacctggcgttgctcgaacctgaacgggtcacgcgcctgatcacgatgtcggtgccgttcgccgggcgagcgcggcggccggtgatagaaatcatgcgtgagctgtacgccgaccgtttcaactacatcctgtatttccaggaacccggcgttgccgagcaggaattgaacgccgatatcgaacgcacattgcggctgttcatgcaggatcaggatgtgtttttgcaacgcaaaccggcgaatgccaggttgcttgaaggcgttccagcacccggcgcgttgccacactggtgctcccaggcagacctcgacgtctacgtgcaaaccttcgccgagcaggggtttcgcggcccgttgaactggtaccgcaacttcgagcgcaattggcaacgcacggaacacctggcgggcaagcaggtgctgcaacccacgttgttcctgatcggcgaccgcgacccggtcggggtattcgaggcgcatacgctcaagcgtatgccggactcagtacctcagcttgagcagcacgtgctgcccaactgcggccactggatccagaacgagcaggggcaacaggtcaacgcgctgatgctcgggtttctaggcaaaacgtaaaggtcgcacctcggccggggcggtccaccaggctgatgctgcgcccgtgcagttgcaggatgcggtgcacgatgcgcaggcccaaccccccgtcgcgccgggcgccaccaatggtgaatgcgcgcaggaacaagccttcgcgtaattcagcgtcgatgccaggcccgctgtcgctgaccgtgaccgctaccgcgtgtgcttgaggcgacaggatgacctcgatttcgccattcaccggtgtgtgccgcagggcattgtccaacaggttggtcagcacccgttcgatcaaccccaggtctgcctgcaccgtcggcacctgcggcggcaggctcgccgtcagcgtgatgccgcgtgcttcggcggtgagttcgaatttctggaagatgtcctgcaccaggtcgggcaatgaaaaaccttcgatcactggctgcacaaagccatgctccaggcgtaccagttccagcagcgattgggccaggccgccgactttgcgactctggtccaaagcaatccctaggtagcgacggcgctcttccgggctgaggctggcgtccttgagcgagagggtttccagatagccatgcaaagaggccagcggtgtgcgcaggtcatgggagatattggcgaccatttcccggcgttcctggtcctgatgggtgatggcgcgccattgttcgcccaggcggttctccatttgcatgaaggcctggtccagcaccgcaatctcatcgccgctggtgagtggcggtgcggtggtttctgccggtttgggcgcgccattgatgtcgaactggccaaccttgtcggtgagttgacgcagcggccgggtgatccaggcaaacgcgatcaggccggccatcaggcagagcagggcgaccaggccgatggaccacagggcaatcttcaaggccatgcccgtggcgtccttggcgtcgtattcatcgtgggcttctccgagcagcaccacatacaggaatccggtctgcttaccgccggccatgaggggcgcggcgctgaataccttgcgcccatcgacgctgcgcgggtcgtccccgaggatcggcagcatgaagcccgccaggaagcgccggatgggcgccaggtcgaccttgtcacgcagcaggtggccgctgggcgcggcattgccgaccacacggccatcgatgtcgagcaggtacacctcgacgctggggttgaccagcatcaactggctgaacaggttgcgcacggcgtcgggcttgaggccatcagcgtccatcagttgggtgtcgcgggcgatatgcgccgcgagatcgcgggacaggccttgcaccacttccagctcgtgcatgtggttggaacgcacctgcagccacgccgacgtgccgctgcagatcaacagcaaaaccgcgaacaccagcgacaggcgctgggtgagggtgagcttcatggcgggctctcggcaaacttgtagccacggccccacaccgtgaggatgcgcgccgggttggccgggtcggcttcgaccttggcccgcaggcggttgatgtgggtgttgaccgtgtgttcatagccttcgtggctgtagccccacaccgcgttgagcaagtccatgcgcgagaacactttgcccggctggcgcgcaaagaagtacagcaggtcgaattcccgtggggtgaggtccaggcgctggccttgcagggtggcatcgcgggtcagcgggttgatgaacaattggccaaggtcgaggctgccggcgtccatcttcaggttacgcgccatggcgtcgacccggcgcagtaacgccttcacgcgggcgaccagttccggcatggaaaacggcttggccaggtaatcatccgcgcccagctccaggccgaggatgcggtgcagttcgctggagcgtgcgctggtgatgatgatcggggtgtagcgcgtcatggcgcgggcgcggcgacagatctccagaccgtcgacgccgggcagcatcaggtcgaggatcagcgcatcccagccgccttgctccagcaggcgcaggccttcgttgccatcggtgctgtgcaccacctcgaactgttcgtcacgcaggtgcaggcagatcaggtcggcgatatgggcatcgtcctcgaccaccaggacacgtttgggctgatccatgtaagagaaaccttcgcttgtagttcgcgcattgtgcggcttttgcaacagtgtagttatcacgaattgtttaactctgcgtgaggattccgcgaccgtaaacagcccaagattccctcacttcaaagagggaaagcaccatgtactcacgccgacaaatactcctggccagtggcggcctgggtgtcgccgtcctggcgggcggcctgctcaagcaactcagtatggtcaccgaagccgaagccgccgaaaccttcgaggtcagccacaccgacgcgcaatggcacagcctgctcaccgacgagcaatacgccatcctgcgcgaggagggcaccgaacgcccctacagcagcgcgctcaacgatgaacaccgcgccggcaccttcgcctgtgccggttgcgcgctgccgctgtttgcctcgaccaccaagttcaacagccacaccggctggccgagtttctggcagccactggacaacgcggtggccagccataccgatacgtcctacggcgtggtgcgcaaggaaatccactgccgccgctgtggcggccaccaggggcacgtgttcgatgacggcccgccacccaccggcctgcgctactgcatgaacggcgccgccatgacgttcacggcggcgtaagccgatgtctatttcttataagggtccatcccatgtggcttctggttctcgcgtacctgggcggcgtgctgacaatcgtcagtccgtgcatcctgcctgttctgccttttgtcttcgctcgcaccgggcagccgtttttgcgcagtggcttgccgctgttagcggggatggcggtgacattcgccctggtggcctcgctggcggcggtgggcggcggctgggtggtgcaagtcaatcaatacgggcgctggctcgcgttgctgtgcgttgccctgttcggactcacgttgttgttgccgcaactctcggagcgcctgacgcgcccactggtagccgccggcagtcgtttgtcggaagccgccggggccgatgccaggccgcgtccgggcgcgtcgttcctgatcggcgtggccaccgggctgctgtgggcgccgtgcgccgggccgatcctggggctggtgctcaccggtgccgcgctgcagggcgccagcatcggtactaccttgctcttgctggcttacgccgccggtgctgccacctccctcgcgctggcgttgctggtcggcggtaaagtctttggtttcatgaaaaagtccctcggtgccggcgaatggctgcgccgtggcctgggcgcgctgatgctggccggtgtggccgcgattgcgctgggcctggacacaggcgtgctgtcgcggctgtcgaccgcgtccaccggtggcctggaacaaagcctggtggatcgcctcagcgccaagccggcgcagcccggcggtgcgatgatgatggccgccaatcacagcgacaccttgccgatcgaaggcgcgctgccatccctcgatggcgccgtgcaatggctcaacagcccgccactgaccgccgaagcactcaagggcaaggtggtgctggtggatttctggacctactcctgcatcaattgcctgcgcactctgccgtatgtaaaggcctgggccgaaaaataccgcgaccagggcctggtggtgatcggcgtgcatgcgccggaattcgcctttgagcgcgacgtgaacaacgtcacccaggccatgaaggacctgggcatcacttacccggtggccatcgacaacaactacaagatctggcgcgcgttcaacaaccagtactggccggcgcattattttgccgacgccaagggccagattcgttatcaccacttcggtgaaggcgactacgccgagtcggagcgagtgatccagcagttgctgcgtgaagccggcgcgaagaacgtcgcgggcggtttgatcgaggccgatgccaagggcgtgcaagaagcgccggacatgaacgaggtgcagtcgccggaaacctacctgggttcgcagcgcgccgaaaacttcgtcaagtccggccccctggcactcaataattggaccctgcaaggccaatggaacgtcggcggccagcaagccaccctcgaccaggccggtgggcgcatcgtctaccgcttccatgcccgcgacctgcacctggtgctcgccccgggcgccgacggcaaaccggtgcgtttcaaggtcacgctcgacggccaggcgcctggcgatgcccatggcaccgacgtcacgccggatggcagcggcaccgtcaccgaacaacggttgtaccaactggtgcgtcaaccgggtgccgtgcaagaccgcaccttcaccattgaattccttgaccccaacgtgtcggcgtatgccttcacctttggttaacccggagtgcctgccatgaatgtattcaaatacctgcccgtgttggccttcgccgcgttcgtcggccaaagccaggccttttccttcggcgccgccgccgacgccgtagtgatcgcgccacccgccctggacctgcccgccgaagccggcaacctgcaaaccgctgtgttcgccgggggctgtttctggggtgtgcaaggggtgttccagcatgtgcaaggcgtgaaaaacgccgtgtccggctacgatggcggcgccgcaagcacggcgcagtatgagtccgtcagcgacggcaacaccggccacgccgagtcggtgtcggtcacctacgacccgagcaagatcagctacggcaaattgctgcaaatctacttctcagtggcccacaaccccaccgaactcaaccgccagggccctgacaccggcacccagtaccgttcggcgatctttgcgcagaatgccgaccagcaaaaagtcgcccaggcctacattgcccagctggatgcggccaagtccttcgacgcacccatcgtcactaaaatcgagatggacaaggtgttctacccggcggagtcctaccatcaggacttcctcaccgagaacccgtcttacccgtacatcgtgatcaatgatctgccgaaggtggcgcagctcaagaagcttttccccgaccagtaccgcgccgagccagtgctggtaaaacaccagtaaccggaatgtgggagggggcttgcccccgatagcggtgaatcagtccccgaattggctgactgacccactgctatcgggggcaagccccctcccacattgtttaatcccagtggacgttagatgacctccaggtacgagctgtgaatcgcccgcgccagctcgcgcacggtgtcgataaattccgtaagacggctgtgcaggccgtcttcaaggatttcatcaatccccgtataccgcagccgcgcctcgaactccgctgccaggcgctgcgccgtgcgcccataactgccgggcaggtccgcgaggatatggctcaactcctcgatgcacgcatgcaacgagcgcggcacatcgctgcgcaacagcagtaattcggacacggaacgggcattcaacgcgttcggatacagctccgtgtacgcctcgaacgacgacaacgcacggagcagggcgctccactggtaataaccgcgtgccgacaaatcactgacttcttccgattcctcgccgaacatctcgtagcgcgcatccagcaaacgcagggtgttgtcggcgcgctcgacaaaggtgccgaggcgaatgaaccgataggcgtcattgcgcatgatcgtccccgaggtggcaccacgaaacaggtgcgaacgctgcttgacccagtcacagaagtggctgatgccatgtcgcgccaggccgccggcggcgatactgcgcatttccagccaggtggcgttgaggttttcccacatgtcggcggtgatgcgtccgcgtacggcgtgggcattgccacgggcggcgcgcaggcagttgtagatgctggcggggttttcttcgtcgagggcgaagaagtgcagcatgcgctcggcatccagctgtttatgccgctcaaggtagctgtccagggtgccgctgctgagcaacgacatggccagttcgtccagaccgtcgctgcgcccggcttgtggcatcaacgacagcgagtaactgacttcgagcatgcgcgccaggttttcggcacgctccaggtaacgggacatccagtacagatctgcggcggttctactcaacatactcagccctccaccacccaggtgtccttggttccgccgccttgcgacgagttgacgatcaacgagccttccttcaatgccacgcgggtgaggccaccgggcaccaggcgggtttccttgcccgacagcacaaagggccgcaggtcgatatgccgtggggcgatgccgttttcgacgaaggtggggcaggtggacaggctcaaggtcggttgggcgatgtaggcatgggggcgggccttgatgcgttggcggaagtcctcgatctcggcggcgctggaggccgggccgaccagcatgccgtagccgccggacccctgggtttccttgaccaccagttccggcaggtgggccaggacgtgggacagttcatcgggcttgcggcactggaaggtcggtacgttttgtagcaccggttcttcgtctaggtagaaacggatcatttccggcacataggggtagatcgacttgtcgtctgccacgccggtgccgatggcattggccagcactacgttgccggcgcaataggccgcgaccaggccgggcacaccgagcatcgactcggggttgaaggccttggggtcaaggaaggcgtcatcaatgcgccggtaaatcacgtccaccggcttggggccgtcggtggtgcgcatgaacaccttgaggtcgtgcacgaacaggtcggcgccttccaccagttccacgcccatttcccgggccaggaacgcatgttcgaagaacgcgctgttgaagcgccccggcgtcagcaccaccacattggggttgtccaggcggctggagctcttgagggtcttgagcagcaggttggggtagtggtccaccggcgcgatgcgttgcttggcaaacacctcggggaacaggcgcatcatcatcttgcggtcttcgagcatgtagctgacgccgctgggggtgcgcaggttgtcttcgagcacgtagtaggtgccatcgccgtcacgcaccaggtcgacaccggagatgtgcgagtagatgtcgcgatgcaggtccaggccgaccatggccttctgatagccctcgttacccagcacctggtccgcgggaatgatcccggccttgatgatgcgctggtcgtggtagatgtcggcgaggaacatgttcagcgcattgacgcgctggatgcagccgcgctcgatcacgctccattcactggcagggatgctgcgcgggatgatgtcgaaggggatcaggcgctcggtgtcttgttcgtcgccgtagagggtgaaggtgatcccggcgcggtgaaacagcaaatcggcttcgcggcgacgctgggccagcagttccggcggcgtattcgccagccagcgggagaagtcctgataatgcgcacggcaggcgccgtttgcgtcattcatttcatcgaagaaagatcgagccattccagtaccttgtcagtgccgagggacgcttgggtggcactgccgtttcaaaaaacgcattttttatgagcccgtggctaagggtgccactgggcctggtccttactttcttgtggggtcggctctgggtcggggggtaacgaatgctcctgtatccgggcagatgaatggataaagcaatgcctgtgccgaaaccgcgaatcttgtggtgagcgggcttgccacagaagcctgttcaccacagaaggccatcaccccaacaagcccgctcaccacaagagggcagcggcttgaaggtgccccgacttggtgcatgaacaaacttgaacttcactcgccaccgactcttctaacaggactcgaacctgctgggagcaccgtcgtgcccagaatcatctctccccatacgccggaagcggccctgaccgaccacagcgaacacaacgcgaagatcttcggttcgcccaaggaccggttggacttctaccggcgcgaaatccagtacgaaaccaccatcctggccaaccgcaccgacgcctacctcaccgcgcagtcattcctggtgatcgccttcgtctccggcatgggtaacctcaaccctgagtggggcaagctgttcaccctggtggtgccggtgttcctggtgatgctcggcgtgctcagctcgttgaatgcctggccggggatccgtgcggcctacgagatcatcgaccattggcactacaaacagagtgaactgctgcgcagcgagccggtgatgggcctggcctacgatgagtcaccgttgttttccgagatggagtcgtcccacaagggctatcgcaagtcgctgctattctcaatgcgagcgccctggctgttcatggtgttctggctgttgctgggggcgtacgcgttctatattcaggtggataaccctggctcataaccgaggagagcgtcatggcaaacgactgcgaggaagaagaaccgaatgacccgggcaacgaagacccgggttccttgatggacgatgcaaccgtgccgttgattgaccaggagggtgacgctaccgagccgccggattgaagcctattcgatcaactgtttgccgatggttttcatccggatcatgtccatcaactgccgcagccctggctgcgactgccgtcggctcgggtagtacatgcacaacggctcgccctggcaggcccagtcgggcatgacctccaccaggcggccgtccttgagctcctgttccacgcggttggacaggcagtaggcgatgcccaccccttgcagcgccgcattcacaatagtctcggtatcagccgcgctgaagtggcccggcacgtcgatgcgttgctggcgggtgccgttgcccagttcccacttgtaggtggtcttgtcgcccaggtacatgcggatgcaggcgtgttgcagcaggtctttgggcacctgcggcgtgccccggcgggccaggtaggcgggcgacgcgaccacgatccagcgcagctcaccggtcaagggcaccgccaccatgtcctggggcacggtggcgccgtagcggataccggcgtcgtagccctcggcgatgatgtcgatcatctggtcctgcacgatcaggtccacgcgcagttgcgggtaggcggtgcagaagtccccgaggatcggcgccagcagcaataccgccgcgtcccgtggcacgttcaagcgtagccggccaatgggcgcgtcgcggtacaactccagggtgtcgaggccgtccttgatggtggcaaagccctgggtgagtttttctgccagcagcgaaccggcatcggtgggttccacggcacggctggtgcggtacagcagcttcacccccaggcgggtttccaggttgcgcatggtgtggctcaaggccgaggtggtaacgcccaactcatgggcggcgtggcgaaagctgcggcgacggatgatagccatgaacacgttgagatcggccagttcggaacggttgaaagcagccattttcaagcctcttatgcgggagttcggctgtatgcggcgttgagcccgattcaaccgtggatgacttagagtaattgtttttctaagcattattgcaagccacgagatattttcatgcgcgttgagaccatcagaattgccggcatcgaacaggcggtctcgcggatcgccctcggcacctggtccatgggcgggcacctgtggggcggcgcggacaccgagcaagcctcgcgcaccttgcggcacgcgttggcggtgggtatcaacctgatcgacaccgcgccggtgtacggctttggcctgtccgaagagctgatcggcaaggccttgcgcggcgtgcgccacagcgccgtgatcgcgaccaaggcggggctgcaatgggacaccggcgccatccggcgcaacgccacggcccagcgcattcgcaaagagctcgaaggttccttgatacgcctgggaaccgactacatcgacttgtaccaggtgcactggcccgatccgttggtagcccaggaagaaaccgccgatgaattggagcgcctgcgccgtgagggcaagatcctggcggttggcgtgagtaattattcctcggcgcaaatggacgatttcagccagtacaccgccctggccacggtgcagccaccgtacaacctgtttgaacgtgccatcgacagcgacatcctgccctacgccaaacagcattcgctggtggtcctggcctacggcccgctgtgccggggcttgctcagcggcagcatgcacacagccacgcgctttgccggcgacgatgtgcgtacgctcgaccccaagttcaagccgccacgcttcgagcaatacttggccgccgtggccgcgctgagtagctacgcccgcgaatgccacggcaagtcggtgctcgccctggccctgcgctgggtgcttgaccaaggcccgaccatcgcgctgtggggcgcccgccgcccggagcagctgaagggctatcaagaagccttcggctggcacctgacgcccgaagacctgtcgcatatcgaccgtatcctggccagcacgataaaagatcccatcggcgcggaatttttagccccgcccaagtgttgacccttcgacagggatgtccaggtttttgcatgaagcgcggcacctgatgaacccgctgtaactgtcagccccgtagaacaggtgataagcaccctgtggcgagcaggcttgtcctgcgttgggttgcgaagcagccctgaaacccgcggccgaagcgtgcctgactcagcgcattcctctttccagggtcgcttcgcaacccaacgcgggacaagcccgctcgccacagttgcagtgctcgccctccaagactttgaaagggctggttgtaaatgtgcggaaatcgccataacgacctctttggacgataaacgacaccgggccaaacatgcccattgaacgactgttcagtttgcactatgttgaccgcatccacccgtttggaaccgaacgggttagcgctttttcttcttgaacgagaggctctggcatgcggttttcccccttcgtcgaacgaattgcagggcagggcgtagccgcctgggacatccaccacgccgcgttccacgccgccagtcagggcgaagacatcatcattctcagcgtcggcgacccggatttcgccacgccgtcctttatcaccgacgctgccgtcagcgccttgcgcgatggcgacacccactacaccgaaatccctggccgcccggcactgcgcgaagcgattgcagcacgctacagccagacgctggcacgcccgctcgatgccgcaaacgtcatcaccgtggccggtgcgcagaacgccttgttcgtgacgtcgctgtgcctgttgcaggccggtgacgaggtgctggtgctcgacccgatgtacgtcacctacgaagccacgctcaaggccagcggcgccacactggtgcgcgtgccgtgttcccctgagtcgggctttcgcgtcgatgccgcgttgctcgccgccgcgatcaccccgcgcacacgggcgattttcttctccaacccgaacaaccccaccggcgtggtgctcaacccgcaggagctgcaagccattgccggcctggccatcgcccacgacctgtgggtcgtggtggatgaggtctacgaaagcctggtgttcgacggcgagtaccacagcctcgctgcactgccgggcatggccgagcgctgcgtggtgattggcagcctctccaagtcccatgccatgaccggttggcgcatcggttggctcatcgctgcgcccgcgctgatcgcccatgccgaaaccctggtgctcagcatgctttacggcttgcccggctttgtgatggaagccgccaccgccgccgtgctggcccatgatgaagtgacccagggcatgcgcgagatttatcggcgccgccgcgacctggtggtggccgggctgagtgcctgccctggtatccaggtgcgggcgccgcaagcggggatgttcgtgctggtggacgtgcgcggcaccggcctgggctccctggattttgcctggcgcctgtttcgcgaagcgggggtatcggtgctggatgcggcggccttcggcgagcccgcgcaaggtttcgtgcggctctcgttcaccctcggcgaagaacgcctggcgcaggcctgccaacgtatcgcgcagtttgtcgccaagctggccggtgagccacgtatcgccgccgcgcccagggttgaagtggcgcaacctgtcgcagccaggaagatgatcgaggtcatcgacctgcataagcgcttcggcaatatcgaagtgctcaagggcatttccctcacggcccacgaaggcgaagtcatctcgctgatcggtgccagcggctcgggcaagagcaccttgctgcgctgcatcaacatgctcgaagtgccggaccagggcagcattcatgtagacggcgaaagcatcaagctcaactacggccgccccggcgcacccctggtggcggatgcccggcagttggtacggatccgctcgaccttgggcatggtgttccagaacttcaacctgtggccgcaccgcaccgtgctggaaaacctcatcgaagcccccacccaggtattgcgcgaaagccgcgccgaggccatcgaacgtgcagaaagcctgctcgaccgcgtcggcctggccgccaagcgcaatgaatacccggcctttctttccggtggccagcaacagcgcgtggcgattgcccgggcgctggccatgcgccctaaagtcatgctgttcgacgaacccacttcggcgctcgacccagagctggtgggcgaagtgctgcgggtgatccgctccctggccgaagagggccgcaccatgatcctggtcacccatgaaatggcattcgcccgggatgtgtcgtcgaaagtggcgttcctgcaccaaggcatgatcgaagaaaccggttcgccggacgcggtgtttatcgacccacgcagtgaacgttgccgacagttcgtcaacgcgcaccaaactcgctaactccagaaaaagacggggcaacatcatgcaattcaaacgtatggcaacgtggttgagcagtgcagtgttgatgctggccgcaggtttcacctgggcggccgacaagcccatcgtgtttgcggtggcggccgaaccctacccgccgtttaccgtgaagggcggtaacggccagtggtccgggttcgaggtggacctgatccacaagctctgtgaaggcatgaaagccgaatgccagatcaaggaagtggcgtgggacggcatcattccctcactgctggcgaagaagatcgacgtgattttctcgtcgatgtcggtgaccgacgagcgcgaaaaacagatcgcgttcagccgcgcctactacgattccctgctgggagttgcggggccaaaaggcagtgaagtcgagatctccccggcgggcctcaagggcaaattgatcggcgtgcagatctccacggtcagcgccaattacctgaagaagtattacgaaaacatcgccgacctcaggtactacgacacccaggaatcggccaacgccgacctgatcgccgggcgtatcgactacatgatggccgacgacaccgccatcgccatgatggtcaagaccccggaagccagcggcctggcgcacatcgccagcgtgccctacgacccgatcatcggccgtggcgtcggtgccggcctgcgcaaggaagacaccgcgctcaaggcccggctggacaaggccatcggcgagttgctggtgagcaaggactacgacgacctgtcacagcactatttcggcctgtcggtcagcccgtgcaagcgcaccgataccccggcgtttgtgagcaagacctgtgacagcccgtaccagcaaatcgcccagaagaccgaataaccatgttcgaccttctcggtttcggcgaacaagggtggggccaggcgttgctcaaggggttatggatgaccctgcagatctccgccgggtcatttgcggtgggcttgctgatcggcctggtggtggcctgcgccaagctcagcgcgccgcgtcccatcgcgctgctgatgcgcggctacaccacggtgtttcgagcggtgccggaactgctgctgattctgctgctgtactacgccggctccatgggcctcaacgcgctgatgctgtggctgggcttcgcccaggtgaatatcagcggcccgctggtggcgatcctggtgctcgggctggtgcagggcgcctatgcctcggagattttccgcgcggcgatcctggcgatcccccacgggcagatcgaagcggcgcgggcctttggcctgagcgggctggggctgttccggcgggtgacgctgccgatcatggcaccgttcgccctggccggcatgtccaacctgtggatcaacctgatcaaggacagtgccttgatcagcgtggtcggcaccaacgaactgctgtacaccgccaagcaggcggcggggtcgacccgccaatacctgctgttctacctcgcggccgccgccttgtattacctggtgacgctggcttccaactacctgtccgggcgcctggagcgccgtatccgtcgctggatgccggttgtcgagtgaggcgcacatgcctgagtggataagctactacgccgggctgatcgccaaggggttgcagaccaccttgtcgctgctggtgatttcggcagtactcggttttgccctggcggtgctggtggcgctggcacggttgtcgcggcgcaagtggctggcgcgcagtgcgctggcctacaccagcgtgctgcgcggtacgccgttgctgatccagatctacattttctactacggcttgggcagcctgttcgcccagttcccgatgatccgtggcagcttcctgtggccgtatctgcgcgatggctactggtacatcgtgtttgccctggtgttgtcggtaggcgcctatgtcggcgaggtgattcgcggtggcctgctggcggtgcccaaaggcgagatggaagccgcctcggcgttcggcatgaccccacgccaagccttgttgcgcgtgcgtttgccacgggcgatgcgtctgttgctgccgaccctggccggggagacggtaatgctgctcaaatccaccgcgctggcgtcgaccattgccgtggtcgacctgctcggcgcggccaacgtggtgcgcgcgcagaccttgcagatctaccagccgctgctgctggtggcgggcgtctacctgtgcctgaccttcctgatcgaaggcgtctacgccatcgccgaacggcgcggtacgccgctgcgcaggtcggccggatgagccggtgtcacaggatgtgatcggcgctgaaggcaccgtgacgcaagccttgtacccagcagcggcagatgtgcaacccgttggcagggctgaaggtgccggggttgaggcagccctcgagccagagtccgtcgagcatcgccgataggccaatggcggccaggtggctgtcgtggatcagcaggctttcactgcgggccaggtcgtccaacaggcgttggatcagccccaggtaggcgtggtaactgttttcgtgggactggttaacgtggggcgagtggcggatcaggctccagaacaccacccacacgccgagcaggtcggggtccatgacccgtggcgagaacgaggcactgagaaacgcgtccagccgtgcggcggcgccgtcagccagttcgacctgttcccacagggcagtggtcagctcgttggccagcttgtggtaggtctcggcaatcagcgcgtcgatgctgccgaaatggtggttgagcaagcccaccgatacaccggcttcggaggcgatgcggcgcacggaaatcccggcgtgcccgtcgcgggccaggcaggtgagggcggcggcgatcagcaggtcgcggcgctcgtcggggtcggcacggcgcagtttgtgagggtcgacggtcatggacaggcctttgatggaaacaccacagcgctaaggttagttgaacgtatgttcaatctctagcggttaatgaatgagaggagggcaaggcatggcaaacgacctttcgtggcaggtcatcggcgacgccggcaacccgctgcacattggcgcctggcgcttcgaaggcgacggcagcgggccaagggtgcacctgcaggcgggtgtgcacgcggatgaaatcgccggcatgctggtcctgcatcagctgttgccacgcttgcaggcgtgtcaggaccaaggccgcctcaagggcagcgtcaccgtggtgcctcaggccaacccgttcggcatcggccagttccgccagggccgtttgctggggcgctttcatgaagccaccgggcagaacttcaaccgcgctttcgatcactccctggccatggcgcagccggcgagcaacctggcgcagtggcaaaaacgcctggtgcaactggccgctgaagccgacctggtgctggacctgcacaccgatgacgaagcgctgccgtacctctacatccaccgcagcttctggcccgaccagggcctggcgttggcggcggccttgcgcgtggacctggtgatcgtctgggacgagggcggcgatggttcctttgaagagaccatcatcaaccatgcatcgccgcaactggccgcgaccattgagctgcgcggccaggcggacgtcagcgatgcgctggcgcaacaggatgccgacggcctgtgggcgtggttgtgcatcaacggcgtgatcgacgaggtggccgccatcgccgagtggccaggggacgtggtcgacatgggctgcatggaaaccatcctcgcgccttgcgccggggtgctggtgttcgagaaagccctgggggattacgtggaggaaggccagcgtttcgcacgcatcatcggccgccccggtgacccgtgttccgaagtgatcctgcacgccgcccaggccggccgtatggtcacaggccaccgcgaacgcctggtggcccagggttcggtggtcgccaagttcaccgggacgcgcttatccgacagctacagcggtggcgtgctggacccgtagcggtgtctgtgtgggagggggcttgcccccgattgcggtggatcagctgtagatgagttgactggcctggtgctatcgggggcaagccccctcccacttttttaacgcagtgtgccattggtcgaagtgtgagcccaaccgcttcaaccgccgcatcgcactgtccagatgcgggctggcacagaaatgcaccacccaccggggcttgatcgagtgcctgcgtgcggaaatctcacggactctctaaacgctccagcaacaggcgctccagggtgtccaccggcagcggccggctgaacaggtagccttggatctgatcacagccggcctccttcaagaacgccagttgcgcctgggtttccacgccttcggccaccacccgcaggctgaggctgtgggccagttcgatgatggtacgggtgatcgccgcgtcctgcgggttgctggtgacttcgcggataaacgcgatgtcgatcttcagcgtgtcgatgggaaaccgccgcaggtacgccaggctcgaatagccggtgccgaagtcatcgatggagatcttcacccccatggcgtgcaggcgctgcaggctggcgatggtgtgctgggtgttttccatcagcgagccctcggtcagttccacctccagccaatgcggctcgaccccggtgcgggcaagggtgcgcgcaatatcggcgatcaggtcgccttcgatcaattgatggccggagacgttcaccgacacctccaccgcgcctatcgcgccgcgttgccactcggcgatctgttggcagacctgctcgatcacccaacgccccacgggcacgatcaagccgaggctttccaggatcggtatgaacactgctggcgataccgcgccgtattccggccgttcccagcgcagcagcgcttctagggcacagatgcgaccgctcagcacctcgaccttgggttggtaatgcaccgtgaagtcatggcgtgccaccgcttggcgcaagtcgttttccagggcctggtgggccaggtcatgcacgttcatgccgatctgtcgttgcgccaactcacgggagtggctgaccaggtcgccgcgttccttgagccgcagcaggttacgcacgcgcaaccatagctcgacacgttccaccggcttgctgatgaattcttcggcaccggcctgcaacccgctgacacgggcgctcggttcgctgagggccgacagcatgatgatcggaatacccgccgtggtttcatcgtttttcaactggctggcaacctcgtagccgtccatgcccggcatcatgatgtccagcaggatcaggtccggcggttgccgggccaccaactgcaaggcttcctcgccgctgctcgcgctcagggtctggtagccctcatgttgcagcagggtttccaggagtttgcgcacctggggttcatcatcaacgatcaacaacgttgcgggttggctggccatggagaggactcatgtgagagggcgggtgtgctgttgcaacaaggtatcgatcacctggtacagctctttgtagcgcagtggcttgatgatgtaggcgtcgcaaccggcgagccgggtcttttcgcgatcttctttcatcgccattgcagtcagggcgatcaccgggatgtgggccgtgagcgggtcgcgcttgagcagcgcggtggcagccaggccgtccatgccgggcaactggatgtccatcaggatcagcgccggttgctgttcgcgggccagggtcaggccggtctccgcatccgcggcccacagcacgtcgtggccagcattgaccagtaacaggcgcgccaggcgcatattggcttcattgtcttcaacgatcaggatgtgggccatgtggcctccggggcgcggtgcagcggcagccaggcaacgaaccgcgccccgcagccttcacggctggccacggcgacactgccaccatgcaggtcggtcagccgcttgaccatcgccaggcccaggccggtgccttcgaatttgcgtgccaggctgctgtcgatctggctgaacgccttgaacagcttgtccatgtccgcctcggcgatcccgatgccggtgtcgctgacgctgagttcgaggaacggttgatcagcgccgtcgggcagggcaaagcggtacaccggccagtcgccgggaatctggccgacctgtgcgcgaggcacctggcgcacggtcaacgtcactgagctgccgtgggcgctgaactttacggcgttggccagcaggttgtagacgatctgtttggtcttgcgcaggtccagctgtagaaggccgagatcgtcgggacactccagcttcaattggatgcgttgcaacgcggccttttcccgcacgatcagcaggctgttggccaacagccccgccagttctgcgttttccagttccagttccatcatgccggcctcgaccttggacaggtcgagaatgtcgttgatcaacgacagcaagtgctggccgctggtgaaaatgtcgccgatgtattcgcgctgggtctcgctcatgtcgccgaccaggccatccttgagcgcttcggaaaagccgatcaccgcgttcaacggcgtgcgcaattcatgggacatggtggcgaggaattcggacttcatatggctggcgtgctccagctccaggttcttttcttccagtgcccgctcgaaacctttgcgctcggcttcttcctgcttgcgcgcggtgttgtcggtgccgatcagcaggtagccgatgatggtgtcataccgattgcgcagggccgtcaccgaaaccatggccgacaggcgactgccgtccttgcggatgtaggtcagctcgtagatgtcttcgatacccctcgaggccttgaacaccagcgcttcgaagcccggcgtgatcggcgtatccagttccaggctgagggcggcggcgcgggtgatcagttcgacggggtcggagatatcggcgggggtgatgcggttgaccacatcggcggcggcatagccgagcatgcgttcggcgccgacattgaagatctggatcacgcctttctcgtcggtggcgatgctggagaagtacgcgctgttgaagattgcgtcttgcagggcgccggtcttgagcagggttttctgccgcttgaactcgacgatcttttcagcccgcgattgcggttgttcgggtaacggtgtgtccatcgctttggcgttccgtgacgttcaggcccgccatcatcgaacgacgatggcgcagagcatgctcacagaagatcgcttgagggcgacgaggaggagatgaggtacttggacaatagcagagattatggctttttgatggcgggccaacggctatcccacttcaaatgaatatcttcgggtcaaattggctgcttttcggattaacggctgatgaaacgtttcatctgtcgacaaatgagcaacgcaagcgcttgcgtaaggaaatgtttctacattagagtcgacccactgacgacaaaaataataaaaccaggagctcattcatgagccttgaacccttgcttgaaatgcagggcatcagcaaaaccttcaacggtttgcgcgtgctcaagaatgtcggcctgaaggtctaccccggcgaaatccacgccttgatgggggagaacggcgccggcaaatcgacgctgatgaagatcctctcaggcgcctaccaggccgaccccggcggtgaaatccgcatcgccggccagcccgtccccacattcgaccccgccaccgcaaaaaccctcggcatcgccgtgatctaccaggaactgagcctgtgccccaacctgagcgtggccgagaacatctacctgggccgtgaactgcggcgtggctggaccatcgaccgcaagggcatgcaggcggggtgcagcgaagtgctgcaacgcctgggcgccgagttcaccccggccacgcgggtcagcagcctgtcgattgccgagcgccaattggtggaaatcgcccgcgccttgcacgcccacgccaagatcctggtgatggacgaaccgaccacgccgctgtcctcccgtgagaccgaccgcttgtttgcgttgatcaaacaattgcgcagccaaggcctggcgatcatctatatcagccaccgcatggccgagatctacgagctgtcggaccgcgtctcggtgctgcgcgacggccagtacatcggcgaactgacccgcgaggcgctatcggccgaagtgctggtgaagatgatggtgggtcgcgacctgtcagggttctacaaaaaggagcacgccgcctataaccccggcaacgtggtgatgcgcgtgcgcgacatggccgatggcaagcgcgtgcgcccgtgcagtttcgacctgcatgccggtgaagtgctgggcatcgccggcctggtcggggcagggcgcaccgaactggcgcgcctgatcttcggcgccgacccacgcacctcgggcaccctggaagtggtcggcaagacagtcacccaactgcgtaccccggcggatgcgatccgcgccggcgtcgtctacctcaccgaagaccgcaaggcccagggcctgttcctggacatgagcgtggcggacaacatcaatgtctgcgcctgcgtgccggatgcccatgccggcggggtactcgatcgcgcccatgccgcgcagcgcgccacgcaggcgatcaagtcgctgtcgattcgcgtggcctcgggcaaggtcaatgtcggtgcgttgtccggtggcaaccaacagaaggtgctgctggcgcgcctgctggaggtcaagccgcacgtgctgatcctcgatgaacccacccgtggcgtcgacatcggctccaagtccgagatctaccgcatcatcaaccaattggcccaggccggcgtcggcatcgtggtgatctccagcgagctgccggaaatcatcggcacctgcgaccgcgtgctgatcatgcgtgaaggccagttggtcgcagaagtcggcggcgcctccggcgacgcaatttcccaggaacgtattattgacctcgccaccggtggcgatcaggtggtggcccatggctgaattgaatatcgcaacaaccggtaaggcagagcgcgcccgcgagctgatgcgcacggtcggcatgttgccggtgctgatcctgctgctggtgggctttgccctggccagcgagaacttcctgacggtacagaacctgtcgatcatcacccagcaggcgtcggtgaacgtggtgctggcggcgggcatgacctttgtgatcctcacggcgggcattgacctgtcggtgggtgcgatcctcgcggcgtcggcggtggtggcgttgcaggcgtcgatgtcgccgcagttcggcatgttcgggattgccgccggtatcggctttggcctgttgctgggcctggtcaacggcgggctgatcgcctttatgcgcctgccgccgtttattgtcaccctcggtgcgctgacggccatgcgcggtctggcgcgcctgttggcggacgacaagaccgtgttcaacccggacctgccgtttgcctttatcggcaacgactcgatcctcggtgtgccctggctggtggtgatcgccgtggcagtggtggcgttgtcgtggttcatcctgcgccgcaccgtgatgggcgtgcagatctactcggtgggcggcaacccggaagctgcgcggctgtcggggatcaaggtgtggaaggtgctgctgttcgtctacgccatgtccggcgcgttggccgggctgggcgcggtgatgagcgcgtcgcgcctgttcgccgccaatggcctgcaactggggcaatcctacgagctggatgcgattgccgcggtgatcctcggcggcaccagttttaccggtggtgtcggcaccatcggcggcacgctgatcggcgcgctgatcattgcggtactcaccaacggcctggtgctgctgggtgtctcggacatctggcagtacatcatcaagggcatcgtgatcatcggcgcggtggcgctggatcgttatcgtcagtccggtgcacggacctgagttcactccaacaacaatcacaagagagacccgcatgaacctcaaacgtatctttccggtcattgccttggctgccctgatgtcccaagccgtcgaagcccgtgagttgaaggccctcggtatcagcatgggctcgctgggcaacccgtatttcgtgaccctggccgatggcgcaaccgcccgcgccaaggagctgaaccccaacgtcaaggtcacctcggtgtcggccgactatgacctgagcaagcaattctcgcagatcgataacttcatctcgtccaaggtcgacctgatcctgatcaacgccgtcgacccgtccgccatggcctcggcgatcaagaaagcccgggatgccggcatcgtcgtggtggccgtggatgtggacgccaagggcgtcaacgccacggtgcagaccgacaacgtcgaagccggcaagctggcgtgccagttcctggtggacaagctctccggcaagggcaatgtgatcatccagaacggcccgcaggtcaccgccgtgaccgaccgggtcaaaggctgcaaggcggcactggccggcgcaccggagatcaaggtgctgtctgatgaccaggacggcaaaggctcccgcgaaggtggcctgaacgtgatgcagggttacctcacacgcttcccgaaaatcgacggcctgttcgcgatcaacgacccgcaagccatcggcagcgacctggcggccaagcagctcaagcgcagcggcatcctcatcacctcggtggacggtgcgccggatatcgagaacgcgctgaagaccgacacgcagatccaggcgtcggccagccaggacccttgggccatggcgcagaccgccgtcaacgtgggcaacgatattctcaatgacaaagccccggccgaagcggttaccctgctcacgccaaaattgatcacccgtgacaacatcgcaacgtacagcggttggtcgagccaacattgattcattgagaggaacagcgccgtggtcaccatggatgacgtggcaagcagggcgggggtgtcgacgtcgacggtgtcccatgtgttgaacggcacccgcaaggtcagcccggcaacggtgcacgcggtgcagcaagcgatccaggcgttgggctacatccccaacaccctggcgcgttcgctggcacggtcaagcaccagcacgattggtgtggcgatttcggcgctgtccaaccattacttcagcgaaaccgtgcacgccattgaaaacgagtgcgccaagcacggctacatgatgctgtttgtcgacacccatgacgacccggagcaggagctacgggtggtcacggcgctgcatcatcgacgggtcgacggcatagtgctggcgccctccaacggttccaaggccctgcagtacctacgggacaaccagatcccggcggtgttggtggaccgcatgatgagcgagcaattcgaccaggtcggggtggagaacacgcagtccacccaagccttggttacccacttgattgaacacggccaccggcgcatcggctttatcgccgggcgtgaggggttcagcaccaccgatgagcgggttgccggataccgcgcggcgctgcacggcgcggggttggcgtttgatccgcagttgctggtcaacggcggctccaatactgcgccggcgcgccaggcgacggtgcagttgctgggcctggcggcgccacccacggcgatcatggccggcaataacctgatgaccctcggcgcgatgcaggccctgcgtgaggcgcagatcgacgtaccggcgcaaatggccctggtgggttttgatgattttgactgggcggattttttcgtgccgcgcctgaccctgatcgcgcagccggtccaggcactgggcacgcaggcagtgaacctgttgttgcagcgcatggcgtcgcccgacgcacccgcccacagtgtgcgcctggcgccgactctgcaatggcgtaattcatgtggctgtaatggattggaatgacccccttatgagcagtcccgtttccctcggcatcgacctcggcacctcggaactcaaggccatcctcatggatcttgacggtacggtgctggcccatgccggcgtgcgcttgagtgtgtcgcggcgtcacagcggctggtccgagcaggcgcctgaagattggtggcaagcgtgcctgcaggcgctggccgaattgcgcgggcatcctggatttgcccgcgtggcctgtatcggcctgtccgggcagatgcacggcgcggtgttgctgggcacggacaaccgcgtgttgtacccggcgatcctgtgggacgactcccgtgccatcgccgaggccgaagagttgggtcctgcgtttgccgacatcaccggcagcctgcccatggccgggctgacggcgccgaaactgctgtggctgcaacgccatgagcccgaggtgttcaaggccattgattgcgtactgtcgcccaaggattacctgcgtttgcgcttgagtggcgagcgcatcagcgagatgtccgatgcagcggggacgttgtggctggatgtggcgcaacgtgagtggttcgcgccgatgctgcgggccacgggcctctcgctggagcagatgcctcggctggtggaaggcggcgctgcgagtgccgtgctgacggcgcaaggccttggcttggcgccctcggtggtgattgccggcggcggtggtgacaacccggtggcggccgtggggatcggggcgatcaatgccggtgatggcttcatcaccctcggcaccagtgctgccattgtcgcgattaccgatcacgccgccggtaatcccgcgagtgccgtgcacagcttctgccatgcgctgcctgatcgctggtacaccatgggcgccatgctcgccggtgccagttgcctgcgttgggtcacgcggcttacgggaacggcggatgagcaaaccttgctggaccaggtgcaggcgcagttgccgatcgaacagccagtgtcacttagtacgccgttgttcctaccgtacttggccggtgaacgcaccccgcataacgacccgctgctgcgcggtggtttcatgggcctgggccatgactgtacaccggcgatgctcggttatgcggtgatggaaggcgtggggttcgggctgttggatgcgttgcgtgccgtgcaatcaaccggtgccgacgtgggcgcctgcgcgttggtgggcggaggggcgcgcagtgaatactgggcgcagttgctggctaatatcctgcagcgggacatcttcaccctgcatggcagcgaattgagcgcgtgtatcggtgcggcgaagctggggtttgtggcgatagagcagggtgcacaattgctggcggcggggatgccggtcaaggtccggtatagaccagatctgatgcagcagccggtgttggaggcgcgttatcgcaagtttcaaggtttactgagcgcggccaaggcccttcacgagtagccttttgtagtgagcgggcttgtctgggtggcctgttttggtgaactggcctgttgtggcgagcgggcttgccccgcgttggggcgcgaagcggcccctttcagcatcaccgcgcttctccagaatttggggccgcttcgcagcccaacgcggggcaagcccggttcgctccccacatcaggacccacaacaagctgctgccgctagtcgcccaagggcggcagacgccgtttcaccggagttttcttgacaatggccgtgttggtttcagcgtaggcgttgagccggtcaagcaggctgtccaggtgatccatggtgcgcacatgcaggcgtgcgatgaagcaatcctccccagtcaccttgtcacactcggtgaactccggaatcgcctggatctgccgctccacctcatgcaatttgcccggcaacgggcggatgcgcacgatggcttggagcagataaccgaaatgcctggggtcgatgtcgacggtgtagtgggtcagcacgccgcgctcttcgagacgccggaggcgttcaccgacgctcggcgaagacagcccggtaatcccggccagggccttgagcgacaagcgcgagtcgtccattaaagcagcgatcagttgctggtcgatggtgtcaatcatggtgtccgcctaattaataaaggcaatccaggtgtctagccttttttaggcgctggagccagtctcaaccagattgccataattgagcctcacttgaggagcctcaatcatggatacatccatccgtcgcgggtcgtgggaaatggtcgccgccatgctgatctcgggcaccattggctggtttgtcctggtctccggcgtgtcggtgatcgaagtggtgttctggcgctgtgtgatcggcgggctgacgttgctgttggtgtgcgcgttgctcggttatctgcgtctggacctgatcagctgggccaagctcagcctggcgatgctcagtggcgtggcgattgtcggcaactggttgctgctgttcgaatcctattcccgcgcgtcgattgccatcagtacggcggtgtacaacgtgcagccgttcatgctggtcgtgctcgccgccgtgtttttaggggaaaagatcaccgtgcagaaactcgcgtggctgagtgtggcgttcctgggcatgttggcgattgttaccgcccatggtgatcaaacaaccggcgacgattacctgaccggcatcgcattggcactgggcgcagcgttgctgtacgcgattgccgcgctgatcatcaaacgcttgaaagcagtgccgccacatttgatggcgttgatccaggtaaccaccggcgcgttgttactggcgccgctggtgccttggaacagcttgccggctacgaccagcgcctggggcgcactggtgacactcggcgtggtgcacaccggcgtgatgtatgtgttgttgtacggcgcgatccagaaactgccgacagccctgaccggtgcactgtcgtttatctacccgattgcggcgatcttcgtcgattggatcgccttcgggcatcgcctgggctggctgcaatggttgggggtgctggcgattctattggcggcggctggattgcaacgcggttggtggtggcgattaaaaccgaatgggtggactgaggacgcttgaaccgcgtttattcactcaagtcgagggaacgagttcctacgcctgcgccacacatggagacaactttaagacgaagcgtactgcccgttttagcgaaaactctctcccgtgatgatgaaagatgaaatccaacttactcagctctccgacgcataaatctctggcaacgcagattcaacaggagtcgcaacccacgaataaccgtcatcgacgcgaggtggaatcccctgccgttcgaaccgaaccaggaccaccggaagtagcgcagcctaaatccggaggtatttccaagcccaacgttacatcaagggagtcctcatcagagctccccaaaagctcaatgcgttgggtgagttatcaacacggtgtcaatcttgccgacgcgctggaacctggttcttcgaagcgaatgactcaggaagaactgatcgccctaccggaaaaaatgagcgcagcggccgttacacctgagcaagaagagttgattgctgcgacacgcgttggtcctgcgctggagtgggctgtagctaacggagtccttgaagaaaaaaccgattactcacaagcggaaattcacgaggctattacggcgctgaatctccatttcgaaaaaatggcgaatgcagtcagcacgctgaccacgcctatgccgatgagaaaaaattacttcatcggtacacaactcgtatcgcccatcaagggccatgccgatccggataatccaaaatacccggtggcgctctatgatgacaaaaagtttgcggaagactttaaagttgatctagcgtccaaaaaagccgcttatggcacgatcatccaacagttggtcgctacgcttccattgccggatcggatagccatcgggcagggtgaagtcgaagtgtacgcaatgaaggcgccgggagagggcggtgagcttgaacgcaccgaattcttgattaaaacggttcacaagggaaagacaacggtttatcaaattgcccctgaacggggaactgccaccaagcgtgatgacttcatcaaactcttcaacggcaacgacgttatcgggaagcaaaaattatccgatggcagttattccagtgtgttcactgcttgggaaaggccgaatattcaagacggccggtatcagccaagggtggatcaccgacctggcgcggcattggacaatacgcctttttcagcacagcttcatacgttggagccgctggcgaaatggcctgcggcaccggaagacgcagagggaagcgccagcccgcaggcatccttcttagagcgaagcaatcagatcgggaccgccgtatcccaaaaactgttttatgcgaaggacctggatttgctgctgatggcggaagaagacccggagcgggtcaccgaatccgaaaaaaaggacagggagaactatcagactttcaaagaggacagggagaaacgtcgccaattgctcaaaggttttgtgcctttctggcgcggaatcgaggcaattattgacggtcgcccaatcgaagggatcgcacaaatatggatagatatcctgacattcatgatgcccgttgaaaaagccgccgcaggtgtagtgagggccggtttccagatgattaaacgcgtgattccaaagtttttgaaactgtcgacaaacttcgccagctacaccttcaaaccgggtgttgcaggaattaaatgggaaggtggcgtgcaggggctgaaatggacatcgagcgcttccaagggggcagccaagggggcagaacaattcaggggcgctatggctaccatacctctgacccagccgggcgttagagaaattgagttgggaggtatcaagtattttgttgccgcaaagcctgacgcaggggatggcgtccactacagtctgcgagtggtgagcccggatgactcgacgaagctaatcaatagcgggaaagttgccaagcctgatgaggcaggtgtttggaaaatgcccgaaagggcgggtcgagatgtaagcggcgcgcccatgacgcagatgaaggggacaatgcaagagctcggtgtcctaggcggtgaaatacatacgtttacggatatctataagggcgagacacggctgaatgttgtcgcgcatggcatagaacggagccctgcggaagtagcggcgggcgttccttctaaagtgatggttgatggcaaagcttacagcgcaaaagagttggttgcgtatttgaagacacagggtattgatcccgcaaatccgcgctataaaaatgtccggctgttgatatgttatgcggcagacggcggaaagcattcgtttgccagcgattttcaaaagattgtgggtaaacctgttaaggcctttgaaggaaccgtcaccacgtcgcatggcgcgacggccatggaatatgttcgcaaagagttaataaaagacatgcgcgccttacatccagacttggatgacaacggtatcgaacttttggtccaagccgagatagaaaaactctttagtcaaaagtccatcttcgtcaacaaagccgacggcaccctcgtgcaaatacaaacggcgcctcagggcgccaacatcggtgagcatatacttaggattgaatataaaccggtacatttcacccggtgacgctcttctctcactgacgggccgctttagaacaaggcggcgtatcattaaaaactgccgtttgtaaaagcgaacgtgctcaccgactttttgtgagcacgctctcctatacgttggggatcagtgcgtgccctggaaaataatgttttccgggttgaagtgctccaccgcgctgcccggctgcggcaagccgaggatgtggcccttgatcttgcccaccacgtgcatctcgcagggtttgcagtcgaacttcagggtcaacacttcatcgccatggatcaactgcatcggcgccaccttggtcttcacgcccgtgacgcccttggcctgtttagggcacaggttgaacgagaaacgcaggcagtgcttggtgatcatcaccggcacttcgccggtttcttcgtgggcttcgaaggcggcgtcgatcagcttcaccccgtggcggtggtagaagtcgcgggctttctggttgtagacgttggcgaggaacgacaggtgcgcgtccgggtacaccggcggtggcgttgtttccgccttgcggccaccccttgggtgcgcagccacgcgcgcggcggtcagcgcttcgatcacttcacggcgcagggccttgagctgtgagttggggatgaagaacgcctgcggcgcatccagttggatgtcggtcgcgtggtattcggtggtgcccagttggccgagcaggtcgcgcagggtgtccagcgcctgttccggtttgttggccacgccgaacgggccgggcagggtgacgctggcgctgataccttcttcgctggtggcggtgacttccagctgtgcttcgcgcagacgtgcggcccaggtcaggccgatacggcgctcggatgaggtcttgagcagcgcctgttgccagttgtggtcgaggttgcggttcaacgggtgattcgggcgcagctgatgcaggccggccggcatttcattcggctcgacgcggtagcggtagcgcttctcaccgtcttcctcgaactcgcctttaggctcggcgatgttggcgcggaaacccaccacttcgcgcttgaccagcacattcaggccgtcgccattggacagcggctcatgggtgaccacttgcaggtcacgcttgccggctttttccaccacacccaccggcaggccggtgaaggtcggggtgtcgaaggcgccgatgtcgaccttgcggtcagtgacgaaatagtcggtgctgccccggtggaaggtcttttccgggtcgggcaggaagaaatgcgcggtacggccgctggacgcgcgcgccaggtccgggcggtcttcaagcacgtcatccaggcgctggcgataataggcagtgatgttcttcacataacccatgtccttgtagcggccttcgatcttgaacgaacgcacgccggcttcaaccagtgcgcggatgttggcgctctggttgttgtctttcatcgacagcaggtgcttttcaaaggccacgacgcggccctgatcgtctttgagcgtatacggcaggcgacaggcctgggagcagtcgccacggttggcgctgcggccgttctgcgcgtgggagatgttgcactgcccggagaacgccacgcacagggcgccgtggatgaagaactcgatggcggcatcggtttcgtcggcaatggcgcggatctcttgcaggttcagctcacgggccaataccaactgcgagaaaccggcctggtcgagaaacttggcacggcccagggtacggatatcggtctgggtgctggcatgcagctcgatgggcggaatatccagctccatcacgcccaggtcttgcacgatcaacgcatcgacgccggcgtcgtagagctgatggatcagcttgcgcgcaggttccagttcgttgtcatgcaggatggtgttgatcgtggtgaagacgcgggcgtggtaacggcgggcgaattccaccagctgcgcgatatcgctcacgtcgttacaggcgttatggcgcgcgccgaagctcgggccgccgatgtacacggcgtcggcgccatgcaggatcgcctcgcgcgcgatggcgacatcgcgggcagggctgagcaattcaaggtggtgcttgggcaaggacatagtttttttagtcaggcttgtcacggttgaggcgcgcattgtagctgtgaaatgcctgaccggcacccactcaggcctgagctgccatcgccgtgacttccacgcgcatgccgtcgaccgccaacgcagctacgccaaccgccgcgcgcacgggccagggcttggcgaagaagcgtttgtagacttcgttgaaagcggcgcgatcggccatgtccgtcagataaatggtcaggtgcatcacccggcccatggaactgccggccttctccagggcgactttcagggcttgcagggtgcattcgctttgcagggtgatatcgcccagttccaggctgccatcggcgcgggtcgggatctgggtggacaccaggatgccgttgaagccgatcacatccgaagaaatcgagtcggcatcggggtcaggggtgtagtgcaggtcgtggttggccatgggcgcctcgcgttggcaggttcagaaaggcgcccatggtccccgaaaatcaccgcaggggcaaactacgcccagcggcggaacagcacgctggcatttacgccgccaaagccgaaaccgttggacagtgcatagtcaatcggcatcggccgggcagcaccgcgcagcatgtcgaggccgtcggcgagggcgtcggggttttgcaggttgagggtgaccggggcgatctggtcgcgcagggcaagcacggtgaagatggcctcgataccgcccgccgcccccagcagatggccggtggcggatttggtcgaactgatcgccgggctgccgtttgcaccgaataccgtcctgatcgcggccaattcgcctttatcacccaccggcgtcgaggtggcgtgggcattcaagtactgcacctggtcagcgtcgatcccggcctgacgcaaggcctgctgcatcgctcggcgtgcgccgtcgccgtcttccgggccggcggtcatgtgataggcatcggcactggtgccgtagccgaccaattcggcaatcggctgcgcacctcgggccagggcgtgctccagctcctcgatgaccaggatgccggcgccttcgcccatgacgaagccgtcccgcgcctggtcgaaagggcgcgaagcctgctccgggctatcgttaaagtcactggacaacgcccgcgccgccgcaaacccggcaaggctgacgcgatggatcgctgcttcggcaccgccgcacacagccacatccacttcaccggcgcggatcatgcgcgccgcatcaccgatggcttgcacacccgctgcgcaggccgtcaccggcgcacccagcgggcctttcaagccgtagttgatcgacacatgcccggcggccatgttgctcaggaacgacgggatggtgaacggcgacaaccgccgtgggcctttgctgtcggtggtgcgtaccgcgtcggcaatcgccgggaagccgccgacacccgaggcgatgatggtcgcggtgcgttcctgcgcttcgggcgtgctcggcgcccagccggcctgcttcaaggcttcatccgccgccgccagtgcgaacaggatgaagcggtccatcttgcgctgttccttggctgccagcagtcgatcagggtcgaacccggcgtctggatcctgctgcacgctctgcacctggccaccgatgctcacggccaggtctccgatcaggtcttccggtaagcgacgaatacccgactgcccggccagcaggcgttgccaggtggattccacgtcagcgcccaatggcgtcagtgcgcccatacctgttacaacgatgcgtttactcatgatcaatcgactccagttgcggtgaaggaacagaccttatggacgtcactatcatcatgaaagtaacatggcgtcacgcacattggcactgacccacaggaatccccatgcaacgcaagtccctcaccagcgacgaatgccccattgcccgcagccttgagcgggtaggggagtggtggagcatcctgatcatgcgcgacgcgttgcagggcttgcgtcggttcgatgagttctcgcgcagcctgggcatcgcaccgaatatgctcacgcgtcgcctgagtgccttggtggaggcggggatgctggagcgccgcgcctacagcgaacgaccgccgcgctacgaatatgtgccgacggccaaaggcgaggatttccgtatggtgttgatgtcactggtggcctggggcaatcggcattacgccgaggagggcaccagtgtcgagttggtggagcgtgaaacgggcaggccggtgcagcccatgttggccagcgcggatgggcaagtggtggggtttgaccagtgcaccttgcagcccggtccggcggccagtacgggcatgcgcgaacgtcttgcgtggctcgatgcaaaaccttgatcgcacgagtatttgacgccagaaaataatcccctcaaggcccgtaaagtcacgtattccgcagccgatagctcatcaagacacagggtttttccgcacggctgagggcacgtcatgttcaataaatcactcaaaacagaactggcggccaggacggccgaagtcaccgagtacaaaggactgatcagtgcactggagcgctccatggccgtggtcgaattcgacctgaacggcaaagtgctgcgggccaacgacaacttcctcaagatcctgggctacagcgccagtcaactggccggcaagtcccatcgcgacttttgcctgccggcgctgaccagcagcccggcctacagccagttctggagtgatttgaaagccggcaagtttgtctccggcacgttcaagcgcgtggatgccaacggccggaccctttggttggaagccagctacaacccagtgctggacgagcgcggccaggtgctcaaagtggtcaagtacgcgctggacgtcaccgcccaggtggagcaggacgcggccacccgcagcaagttgacggccgtggaccgtgcgatggccgttatcgaattcgatctgagtggccaggtgctggacgccaacgcgaacttcctcaacgtgatgggctacaccctcgcggaaatcaaaggcaagcaccaccggttgttttgcgagcctgcgctggtcagcagccatgagtacgccgatttctggcgtcgcttgaacaacggtgagttctttaccgggcaattcaagcgcctgggcaagcacgggcatgtggtgtggctggaggccagttacaacccggtgtatgacggcgacggcaaactgatcaagatcgccaagttcgccagcgacatcaccgagcgcgtggagaaattcgaggaagactcccgtggcgcctcacgggcgtaccatatttcttccgagaccgagcgttttgccgagcatggcacccaggtgatccaagagaccgccacggaaatgcgccgcatcgccgagaatatcggcgcctctgcgcggctggtggggcaactgggcgaccgttccgaacagatcaccgccatcgtcaacaccattcgcggtattgccgaccagaccaacctgttggcgctcaacgcagccatcgaggcggcgcgcgccggggaccaggggcgtggcttcgcggtggtggccgatgaggtgcggcaactggccggacgcaccagccgctccacggcggaaatcgccgagatgatcggcatgatcctctcggaaacccgcgacgcggtgaccagcatgaacgcgacccaggaaggcgcgcaacgcggcgtcagcctggccgatcaggcgggttcggtgatcctgcagattcgcaccagcaccagcgatgcggtgcaggcggtgagcatgttcgcgtcgaaactggatgagtcggaagtcatacccaagactgcggtcggctgggtaggctgacgctctccatttggaggagcgagcaagctcgctcctccagtgggccttgtttagagcagggtaaacggatagtcgacgatcaaccgcagctcgttcaggtcaccatcgcgctggtcggcattcgatgccacgatcgcatcacgcacacgcaacgacagattcttcgccgggccactctggattacgtacttggcttccaggtcggtctcgtggtgtgcgccatccgcaccgtaattaccgacataggcgctatgggccggcgtgtgggtgccatcgatatccgagccgttgatatagcggcccatgaaactcaaccccggcacgccataactggccatgttcaggtcatagcggataccccaggactgctcgcccgggccgttgaagtcgttccattgcaccgagttggccaggtacaccgaatcgccgccttcgccggcgccgttgttgccggtgccgatgtagtcgaacggcgtgtcgccatgcaccttctggaacgacagcgtcagggtgtgcgcctgcaggaacgagtaagccgccgccaccgaataggtggtgttgttgatcgccccggccttggcgctgccggtgtcgagggtgcggtacaggttgccgtccagcgccagggactggtcatgccccaacgggattacgtagttgaggttggtgtagtactggcgccagatatcttccagctcaccggcatacagcgtggcgctcagggacgggctgaagctgtacttgccgccgacgaagctggcgctgttggcggcgatgttggcgtaggtggcgtagatatcgtggtcatggttgctggtcatgccactgttggtgctggtgaaatgcccggcttccaggtccaggccggcgatttcgctgctggtcaggtcaaacccggtggcggtctgtggcaacaggcgcgtgccgccggtggcgaagaccggggcggtgggctgcatgtcgccgaatttgagttgggtcttggagactttgatcttcactgcggcgccgactgagccgtaggcgtcttcgggatcgccatggcggtcggtcggcaggttgccggtgccggcgtccgcatgggtggcatcgagtttcagcccgccgtaggcataggcgtccacgccgaagccgagggtgccctgggtgaaacccgaggcgtagttgagcattgcgccctgggtccagtcgatattatcggcccggccgccttcacggttgcggttcatgtagtagttgcgcaacaacccagtgacgctgctgccctcgacaaatcccttggcatccgcctggtcgctgaccgactcggcaaaggccatctggctgataccggcacacaccgccagtgccaataggctcgactgtttaatcatgttgtgacttccccggaataatgaacgcgcgcacagaaacaccgcacttatcgaatggcgcataacgttgtttgggcagatgtttgcaggtgagctgttacggttttttattgtgttcggcgtggttgccgaggtggattccaggcacagtctgcgcggccgccagcgggccaagggatgaaactcaattaattaaacttcacgctgtttaatttctttcgggtgtacgttgaacctgtcttagccgctctgcttcgacaacatcctttggttgccgccgcaggctctgcggcggattttttcacaacatttcacaagccgggtttcatcccttcggcatcggtgcatcagtggcttgcaaggcgcgcgacgtcgacccgataggtcggcctgtcatctttcagtaaccctcaaggtctttgctctcctgaccggcccgacatgatcgcccatgacgatcatgcactggcccccgtcatcaaggagcacgcgcatgtcagcaccggtcagcaatgcacccgcgatcaagactgtcacgaataacgattccagcgccgaatggggtaacgcggtcgatcgggccaaggccaaggacgccggtatcgaatggcagcgccccaaggatgaccaccgctcggcccaagacatcatcgacgatagcccgctgctgaagaacctcggcaaccagagcggagtgaaggacaagttgcgcgaacgtgtcggtgattttgagcacgatgcggacgcggcttatcgcgccaaccaggtgctgggccacgtcgagcgcttcgatgaaaacggttcgcgcctggctggcaacacgatcgacaatggtcgcgtggacggtttcaccaagggcggcgatgccaagcacggcaccgaggccgggcgccttcaagacttcggcaagtatggctgggagaacctcaagggcgagctgccgcacgcggacacggtgggccaggacgataagcgccgtgaggcggcggacaaggctggcatcgtctgggtgctgccggagggcgacaagcgttcggcgcaggacatcatcaatgacaacccgttgctgaagaaccttggcaaccagagtggggtgaaggatgcgttgaaagagcaggtcggggacttcgacaaggacccgaacgcggccttccgtgccagccaggtgctcgaccgggtggtgggttatgacgagaaaggcaacgcgttgacaggcaaggatgtggccaacagcagtgtcgacggctttaccaagagcggtgaagcgcgccatggcaccgaagcggggcgcttgcaggatttcggcaagtacggttacgaagcgctgggcaagcccccgtccaacgaccagatcggtagctacaaagactttctcaagacccatccggaggccgacgcaggctccaggcagatcgctcagtacggcgcgatcctggatgccaagttcgattcgatccgcggcaagaccggcggcgatggcgctgtcaccgaacagaatatcaaggactacctcaagcaaaacccgcaactgagcaaggacgagaaagaggcgctcaacttcttcgcccagcctggcgccttccgcaagctcgacaccgccggcaacagtatcggtgataagcccgacggcaaggtcagccgcgacgacgtgcaggcctggctgaagacatccgcacccaccgatgcccggagtctggccagcctgatcaccgacgtggccaccggtaacctcacgggcaaggtcgccaccagcaagctggacaaggacatcttcgagcatccggaaaagtactcggccgagcagaaggccgcagtgctgctggaactgcaggagacgcagaaacttgtggtcgacggcgccaacgccggggtctggaacagcgactatggcaaggtttccatcgccaaccgctcgggcgcgatctgggagccgcaaaagctgctgcaagacatcaacgaccacatggccatcttgcagggcgacaagccaactgccgagtacatcaagaacgccggcgaccaggcggtgaagaccctgtttgaagagaatcccggcctgaaggacgccgttaccaagacctatgaggaccaggtcaagtccggcaaggccctggacgccgcgtgggacgccaacaccaaggacggcaagaccgaccagcacacagcgctagccggtttctacgccaccgccaccagcctgcagtcgattctgggtatcgacgatgccaaggcgatccagggcgcggtcgccaaatccacgcataacgaagacttcaagaccttctacaaggatcagttggccagtggcgaccgcctgcgtgagttgctcaagcacaacacgcccgagcaggccgcctcggagttcagcctggaagtagcgctttataacgccgcgctcgatccggccttcacggcccagcacgaccaacagctcaacgagaatttctccagcatcgcccaggataacctgttcaagggggctggcttcgacgacatcaagaccgctttcggcaaggacggcggcgcggagttggacgaagacaaggtccgcacgttgatcgaccaaatgcgcaaggaaagtcccgagctgctgctgaaccaggacggcaccgtggccaccaccgaccaggtcctggcgggtttccgtggcaactgggacctgctccgccagggcaccaaggccctggacaagatgggcaagttgtcggacttcgaccccaatggcggcgccaaaggcgcctacggcagcggtgtactgcatggtgtaagcggcctgttcctggcgggtgtcaccattgcacgcggggcgcagagcggtggaaagctgaccacgcgcaacatcgtcgacatcaccaccggctccgtgcagaccaccaccgtgctgatcgagggcggcaccaagggctaccaggaacacctcgccaagtcgatcaagaacggtgagcagaccctcaaggatatgaaagacggcaaggtcatgctcgacctgctcgatgaggtcaaggacaacgtcaaggatggcaagcacgccaaggtcgtggcgaagaacttcgaggaagccgccaaaggtatcggcggcctggccggcatcgtcgtcggggcgtatggcatttttgatggcgtcaacgcgttgcgtcgtggcgacaagctgagcggtggcttcggcattaccgcaggctcgctgggtgtgctggccggcagcgcctcggccgcggagggcggcctgggtttactcggggcgaacctgccacggtttctcccgggcctggcggccacggcgggcgtgctgggcttcctggcggctggcgtggcggtactggcggccatcgtgcccggcctggtcaaggaaggacaggcacaggccaagtcggataagttcggcgaagtgctgggggattcaatccagcgttatggcatcgatggcgtcaaggatggaacgattgccgatattcctaccaaggattggccaggcggggagcaatggacttcgtgagataggctcgcccaccggtgccggtgacccgacatcggtgggcgttctgattctggagtcacttgaacgtcacccgccatagccgcgtggccaggtgatacgtcaccaccaggctgaaccggaaccaaacacccaccgccaccatcacccataacagaaaggggtacttgcgacgaaagaacttccgatagaagtgcaatatgcccctgtgcttatgccattcgacgaagtaaggccgatgttggctgcagccgcccaatgcgtgggttacccgggcgtccggcacaaacaggacgacccatccagcctggcgcaaacgcatacaccaatccaggtcttcgcaatgcaggaagtagcgttcgtcccataagccgatgtgctcgatggtttcccgcttgatcagcatacaggcgccggagatggcttccacggcaatgggcgtggagggcaatggctcctggtgcaataaaaaatcagagaacagcgacggcattacccgcgcaaggcgcgacaggccaaaggcccgcatgaatgcgcgccgtggggttgggaatacccgccgcccgcccggttgctcacggccgtccaggccgcacagtaacccaccgacggcgccgacgtgcggggtgctacgcagtacggcgagtaaacgggctatcgcatcggcggcgatcacggtgtcgggattgaggaagagcaggttcgccgccgtggaaaggcgcgcgccctggttgcaggccacggcgaaaccgaggttggcctcattgcgcatgatgtgcagtgaatcgctgaggagaggctcgccctccaacaggcccaggctatcatcgtgggaagcgttatcaatgacgatgatccgcgtcgcccccgcgttgaaaaccgatgtgacacaggccaacagcatctgccctgcgttgtagttgacgataatgacatcgcactcagcctgggcttgcgaggtgagcaacacgtgcttttgaggtgtttccagtacagccaacgtcgccactccctgtgtactcaaggtattgccgtagaaaaacgaaccgtccacgagttatcacgacgaaaactccgggtctgctcatctgatggattgaaacgcagggctttttccatcgccgcgccgaccccttcggggccgtccagcaaaaacgtgccagggcaagcgccccggtgcgccatctcgccaaacacggtgctgatcaccggcaggccgagtgcgcggtactcgtagtatttgatggggtcgacaaactgtgtcagcgcgtcgcatttgaaggggatcagcccgatatcgaagccagccatggcggccatggcatccgggtgcgagagctccccgatcaattggatattgctgggcagatccccaggcgggcgtgtgtgtattggcccgaccaagcgtatttgcgccaggggaaatgcctcggcaagcgccacgacgatttcccaggcgaaccacttcgcaatagtgccgacatagcccaccaccagcgggttggcgtttcctgcgtgcctggtgatgcggtaaggaagacgctctgtggcacaggcgttgccgagtaatgtcaccctgtcgcaatacgtcgacaattgcgcgtgcagcgcggaggaggatgtcagcacggtggagacggtttgcgctgttgtccgctggcgccgcgccatggcccgacgcgataagccggtataaaactcgcagaagttgtccatggcgtcgtagaaacttgcttcaaacaacggttctcgcagcagcattgacgctaggcaagagggttttccaatgcccagcaccgtgggctgcagtgccaattgccgcacgcgcgtaaacaggggttgccagagcagtcggttgacccaccctgaacccgcaataggctcgatgggtagggcgcgggcccggtacaccgtgagccagggggggacttcggtgtgcccgggtgctggctggggacgacgtagatcgctcagagcagggagacgcgtggggtaggggtctatccaaagcacgggttgttggtgtgtctcatggaaacatcgaaccagctcatggggacgctggctgaaactgtgccagggggttggggaaaggtagatcaggcgcatatgaaaaaatgctccaccagcacctggacgatgcgctctgcagccctgccatccccatagggggagtgatccttgatcatcgccgcgtaaaggctgtcgttgtcgaggagcgactgcaccgactcgacgatgtcatcggtgcgggtgccaaccagttggaccatgccatgtgccacggcctcctggcgttcggtttcattgcgcaataccagtacaggcactcccagagccggcgcctcctcttgaatgccgccggaatcactcacgaccaggtaggcgcttttcatcacgcggataaacctgtggtagcccatgggcgagcacaggtcgacgcgtgcatgccggcccaaggcagtctctatcggaactttcacattcggattcgggtggacgggaagtatcacccgaaggtcctcattacgctccaccagcgtatgaagcgccgtgcagatgtcacgcaagggggcgccaaaactctccctgcggtgcaaggtcaccagcaatacgcgctgtccatcagacggccgctcgcaggccacgtcgtcgcggctgaggctaaggtgcaaagcatcgatcaccgtgtttcccacgacatggatacggtgctcggcaatacgttcgccaagcaggttgctgcgtgctgcctgggtgggcgcgaagtgccatttcgcgattgtgctggccagggttcggttgagctcttccgggaacgggttgccaaggtcgcctgtgcgcagtcctgcttccacatggccaaagggtatttgcaggtaaaagcaggcgagtgcggttgcgaacaccgtcgtggtgtctccttgcgccagtacggcgtcggggcgccactcgatcagtaactgttcaagttgggtcagcaggcggctggtgagcgcgctcagcgattggtcggcgcgcatcaggtcaaggtccatatccggcacgaggccgaattcgtgcagcgcctggtccatcaattcacgatgctgagccgtcgctaccacacggcagtcgaacagcgtcgagcgcttgagcgcctggatgaccggcgccatcttgatgacttccgggcgcgtgcccaccacgaccatcactttgcatgtctgcatgacgtcatccatggcgatggggtatccaggttccccacttgctttcataaatcgctttgttgcgttcaaacagcgcttggcgtgcctgcgttcccatcagcttgaagctggcggacaagtgatggtgaatgaatacatcccgtgcgcaggcgttgaaatagcccgcttgttcgacccgccgacagtagtcgtcatcctcgaagaagccacagccaaacgcttcatccagcggccccacctgagcataggtgctgcgacgcaacatgacgcaaaagaatgccagggtaggcagggcaaaccattcgcccaggtgcctgtaggtgtaaagacgagcgtgtcgcggcatttcggcaagcgagtattcgatgttcaccttcgcctggttaccgatattgttcgtgaccgggccgatcagccctatgccggggttatggtccaggtgattgcgcagtgtatgcgcccaccccggcgtgacctgggtgtcgttgttgagcagcacgaggtagtcgccggtggcggccgcgagtccctggttgttcgccgcggaaaagccgcgattgtccgggttgaggatgacgtggtgcccgtggacgcgggcccagtgttcgagaaatgcgggcgtgccatcgctggagccgttgtcgaccacgataatttccagtgccgcgctcttgggatcggcaagcaaactaccgaggcacgcctgggtgagcgccaggttgttgtaagtcaccacaatcacgctgatatcacgggcacgtcgtgcgggctcagtggcgcccagtaacgcctcaagtcgatgggcccaggactgggacgcagcgaatgccctgcgttggttgccttgtatgcctggcggttctgcgagcgcctgggcgacgccgtcgatgaacgccccgggtgttcgggcgcgatagacccactcgccaaactggtgggcctcagggagatccacggtcaccacgggtttcccggcgctgaggtactcgtagactttcagtgggttggtggcgagcgtcagcggtgtaacccgaaagggcaacaggcacacatccatggcatgcaggtagtcgggaagggcgctgtaggcgacctcgccagtgaacacgacattggggtattggccgagcttgtgttggacgtgggcggtgtcggcaccgatcagcagtatcacatggtgtgcaaaggcttgggccgtcgctgcaacgaggtcgctgtcgaaccagtcggcgattgcgccgtagtagccaatgatcttgcgaccttgcgggtcttggtagaccgaggcgggacgccgcgagaggaactcgtagtcggccgcgttccgtaccacgatgcgttgttgcgacgccacctgttcccattgttgggcaagccagtcagaggtgaaaataatggcctgggcttcgcggaccaattgttgctcaagccctagaatccgagcgtcgttgttgccgaaaccttggtgatgatcgatgcagtcatacaccagtcggttgttcggcgcggccttggccacttcgagccagaaaggatgatgaaccagtgagactgtctcggtgggctgagtagagagcaacagctcgccgaggcctgttcgcaattgcgtcacctgggccggggacggcgctgtcgagtagatggaaggtactttgctgaggcgcaggcgaatttcgaacaggttcccccgttcatcaagcgggcgtatggaaaacccgggggactgggactcttgcaggctgctccccacgtagaaaacccgccgcccgctggcactgagcgtacgtgcgagctgttgtggccgctgatgacgaaaatcccagtcgatcaccccccagatgatgtagtcgggaccattgggggccgctagcatcaccttgagttgccgacgtgagacgctgccatgcagcggtcggcgtaaccacgtgaacaaccggttgtggaggcgcgcagacagccaccggcgaagcgccctgggtaacggcagctggcgataacaagtgcgcaggcgctcgatcagcgtggctttagcgcccgtcatggccgcgcacctcgtattccgggtagtcatgtaacggtgtggtatcgccctgcggccacatggagctgatggagcccggtcggtagaacgtgacggtgacactgcgccgggacgtggggctactgtctatcactcgggaaaccgcatgccaggagttatcgctgcgaaccagcaccgcggagttaccgatcaagggctggacctcctcgatgatgtgggtggggtcttgggaaccgagaatttgcaagcatccgccccggcatgggtgccatgattcattgaaatagagaatatgggtgacgaccttgtcgggcaggtcggggtgggggccgaggttggcgcccgggccatagtgaaacaggttggcttccatgggggcgtcgtgcagatcgataccggtcaacagcccgagtgcccgtcgataggccggtaaagtcagggtttgtgcgagctgcagccactgcgcgctgagcgcctgggggttagccacttggccattagtcattgaaaccaattgcctggcttcgtattcgtagtttttctcgccgccatagcccttgaccactttgaagtgatcgcgagggtaggtttcagccagcgccgtggcattttcgtggctatacaggttgccgatttgtgcccagtggaacggctggagctgtaacggatggtgggcaattttttccaagtcgatcattgagcattccttgccataaactttttgaatcggtgaaaaacaccacgcccatctgcctgggcgagttggcgcctggcgtccctgagctcaccttgttgtgtttgcatgttttcgaatactgcgggcaaggactgcaagacgcggttcatcacctgcggctcacccgctcgacgggtgacaatgagttctgccacctggtcccagtgctcgtgtagctgtttcaccgcaagttgggtggctggggacaatggctgcctgccaagttgcgcaaaaaaccactgcgggtcgagcggatggtcatgacgcaactggaagacacgcccataagccggtaacgctgtgaatttccccgtatccaggtgcgccgaacaaaacaccggtagaccaaaggcgatggcactgatggctaaatgataactgtggcctatcaccccaaccgaatgagcgatcagctcagcgagcagtaaaggtgagggccagaacggtaacgtcatcgagcgatcaagcgtcggccctagtgccgacgcatgatcgccaagcaccgggccgatcggcaggatcagcaactgcacatgcgccaacgcaggactggcgctgcgccaaagatcgaggaatgtatgcaggccgtctgcggcgtgtacgacgaggtaaggtttatccagctcgtattggctcaagaggtcgcgcagttgcgcagatggccgctgtacatccaccagttgggccaggccgaacgctgtatccggcagcacctcgatgcgcgcgtgttggctcactgactgcaaggccgtttgagtcaaggcatcacgcactttgacatgcgggctgtgttcgatggcaagtgccagtagcggcctggcccagtcagggacgtcgttgcaatgcatgcctggcgcgttccagatcaagggaacgccgtgttgcaatgccatcagggcgggaaccagccaatagccggttgggtgatgaatagcgggatcgggcggcaggtagccgtcagcgacaaatttatcgaagcggatgatgaagccgccgccgatcagcgtggcatccaggctatgcgcgattgctggcagttcggtcagggaggtgactgcatagggccattctccgacggttttcccgtgataggaaaaccggtgcatcctgaccgcgcccaagcggcgcgacagttccgcctcggcgatgatgggaaacaacaggtcgccataattggccacgtcgaatgtgccgtggatcgcaatctgccaggttctggtcttatcgttagccaagtgaagtgccatccttgagatgctggccctggggtagccgttcgacgccgaggtcgacgatgccgagaaagtcgttgccgagtaccaacgtatcgaacgacaagagcgcgacctgtttttcgatcagttgggcgctctcctcggtatggccattcatgagtttcaaggtgatgtgatatcggccggcggcaaagcgcgaacggaaccgagcggtaagggaggctttgcaccagccgtcatgcggcggttcgcgcaacaacttcaggttggccccgccgatcaccagtaaacgcggttcctgaatagtcaggctgatacttggcaaggtgatcgattcacgcaccatggcctccacccgcacctcaatcatgtcgtcgtgcacaaaggtggaatgcacttcctgggtattaacgaagtacgccgtgagaatgcgaccttcgtcagtaccaaaggcgatcccgtctttgttcgccaggtgcgcctttggcaccacggccacagcatcagcactggactcgcgacgttgctcatcacgcacatccagcaagtagcgctcggcaacctcctcgggcggcccgctggcgcggatttccccggcgcgcaggtaaaccgcccgtttgcagaagcgcttgaccatgttcaggtcgtgggacacgaaaagtagcgtggtaccgcgtgccgtgagcgcctccaaacgttgcaggcacttgaactggaacgaggcatcccccacggcgagtgcttcgtcgacgatcaggatgtcggggtccacccagacggacaccgcgaaggcaaggcgcataagcatgccactggaataggtcctggtgggctgttcgataaagtcgccgatgccggcaaagtcggtgatgtcgttgaagcggcgttcgatttcggcgcggctcagccccaggatggcaccattgaggaatacattttcccgaccactgaagtcggggttaaagccggagcccaactccagcaacgccgcgatccgaccttggcacacaacgttgccggtggacgcgctgagcgtcccgcagatcaattgcaggagcgtggatttaccgctgccattgcggccgatgaggcctattgcttcacctttttcgatggtcagtgtgacgtcccttaccgcccagagttcgcggtaatgcggggcctttccaggcaacagcagttgtttcaatcggtcctggggccgatcataaatccgaaaaaatttccctaggccggtgagctgcaccgcgatatcagaggacatcggcaaacccgctgcgcattcgctggaaaccctgaaagccaagccacgccacgcagcaggacatcgacaaacccagcgaccaggtcagcgggtcgatcaacttgccccagaacaggacatcccggacctgctcgatgatcaacgcgatggggttgagtaacaggaccgcttggtaggcctcaggcaatacgttgatggggtaaaacaccgccgaaacaaacagcagggccgtcgtcagtgccgtggtcacttggctgatatcgcgcagataaacgccaagcccggccaaaagccaggaaacccctagggaaaacaacaccagaggcaacagtaccaacggcaggaggagggcggtgagcgggggcggaccgagcagaaacaggtggaaaaccaaccagatgaccaagctcgcggttgtgtgagccaggacggaacccagcgatacccagggcagtatctccagggggaatatcaccttcttcacgtagtttgcgttctgaacgatcagggtaggtgcgcgctgcatgcactctgcaaagatattgaagaccaacaggccggcaaataccagcaacgcaaattcccctcgggattcgctcgcccccaaccacttctgtttgaacatcacgctgaacaccaaggtgtagaccagcaacatcaacagcggattcaggaacgaccacgccaggcctatcaccgatcccctgtaacgtcccaggatgtcgcgcttaatcatcgaactcagcagttcacggtgtgcccaggggctggaaaaaatcccgttcgatgccttcgccacatcccgtgattggcctcggatcgcgattttcattttggcttgcaagtgtcatccctgataagtcgagtactgttcatagcgtgtgccaacgaaaccttgactctcaaccgaggtgtgggctgttaccgttggcacatgactgaaagtagttcaaaaaggggaatttacaaatggcgtgcgcagcggacgaaacctttgaagagaggctggtcccattgaagcactgggggagggggcgggggatagctgtgtatcgagccgttcccaaggctcttcattgccttattcggcgtcaatgcggcacgagcagagccctgtagatcaatggcttacagggctgccgtgagtgatgaactgtgtcagggttattcttttacatccatgaactcttccgcccacgccacgtagctttccggcaacgtgtacgtgtgcgtcagttcggtggcactgaggttatccgtgctgtgggtcaactgacgttgggcacgcaggctgtcatacgtcgccttgatcgcggcgaagtaagccccatgaccggcaaccactatgcgcacgccaaggctggccagacgctgggcgtcattcagtttggggttggcgtaggtcaccagcatcagtggcaccgtcaggttttccgcgatcttctccaagtgcacgaaatcggccacaccgaccatgcaaatcccgtcggcgccggctttctggtaggcctgggtgcgttcgataacggcttcggtcggcaacacgccggcattggtccgggcaatgatcgacaactccggatcgacacgtgcttccagcgccgcgcggaccttgccgatgccttcttcaatggagatcaggtcggtggacttgcgcccgaactgcgccggcagcaacgtgtcttcaatggtcaacgcggccacaccggcacgctcgagctcttcgacggtacgcatcacgttcagggcgttaccgtagccgtggtcggcgtcggcgatgaacggcaactgggcaacgcggccgatgcgggtggcttgctcaacgaactcactcagggtgatcaacgcaaaatcgggtgcggccaatacctgcaacgaggcgacggagccaccgaggatgccgacttcaaaacccaggtcagcggcgatacgcgccgacatcgggtcgaagacggaagcggtttcaacgcaggttggggtggcaagcaattcacggaatttgcggcgcagggctgagtgagaaatctttggcatgggctttcctggttctgggcatcgtcttgtgacgatcaatgtctattcgtggtggggccagattaacatgcgggcgggggggagatgatgacgtttcagcattagggcaggggctggtgcatggagcgtgggtttacggtttgggggggacaggcgcccggggcgggcgccgtcctttccttcatgcctgttcttgatagccttttcgcagtttctccgcgatcagtttctctgcttcacgcaacgcgcgttcgggactctccagggatttgatcaaggtctggcccttggtgccgatgcggccgaaactcaccaccacctcagcctccgtgacgccgatacgccagaatttattagagttgccttcgccataggtgaactcgcgcatcgacggcgccgcttcaggggttaccgcaggctcggcttcgatctcgacggtttccacgacctgttccagcgctggcagtgcaggcgcttcttcaccccgaagcagcgcttcgatgcgcttgagcacttcctccggatcgcgcagccagtcatggctgagcacgtcgatgatcctccagccgaagctgcgcaataccgtcgggcgaaagatataacgctcacgcacgtcagtcgcggctgccgtgtcgctgtcgagcagcacccccagactgaagtattcaccgctggcgtcactgatcgccaggtcacagcggaactgtgaacgcccgacatattcctgcaccgagtgcccgcgttggcgcaacgcgacggcgagggcgctgcgcagtttgtccctaggcaggctgacggcaaaggactgcttggcgcccgggttgaggttggccaggatgccctgggagcgcggtgcatcgccgctggcactggcctgggcgaattgcaggaacgcgcgcaatgcggcggcgccgtcgttatgggtgttggtgatggcctcggactcaatgctggcgacaatcgccatgcgcttgcgcgcacgactgaagatcacgttaaggcgtttttctccgccgcgctggttgatcgggccgaagttcatcagcatcttgccgttcggtcccggcgcatagcagatgctcaggatgatcacatcgcgctcatcaccctgcacgttctccaggttcttgacgaacaggccattgaactgcccggcatcttcacgcacgtactcgcgctcaaggcgtgtggcaaaggccgaatcattgctggccaggtcttccagagcctgctcgatggcgccttgctgggcctcggaaaaggccacgatgcccaggctcaggccggtctcgcgttgcagcagttcacgcacgaggttggcgatgtagcgggcttcggccaggttgctgcggctgaggtagacgccatcgctcatcttcaagaagctgatcgggctgtcgagcagcgtgtcggcgccctggatcacggcctgggcgtcgctggagtccagcgcggcgtgggctggggcagggcgctcgatacgccggtcgggaatggtgatcagccgcccttcgtagaacgctgcgttggagaaactgatcagcgcctcgtggcgactgcggtagtgccaggccagcagggtcgccggcaagttgcgtgcggcctggctcagcaggctgtcggcatcgaggttgattgcgatctgttccccgtcctccatggcaatcaggtcgttatcgtcctggtcaccggcactggagaagaagttggtcggtggcaactgcatctcgtcgcccaccacaatcacctgctgcgcacggctcagggcgggcacggcttcttcgctggggatctggctggcctcgtcgaaaatcaccacgtcaaacaggtccggggtcaacggcagggtgtcggacaccgacaacgggctcatcagccagatgggcttgaggtcgttgatcacccggccactgtcgccactggccatttcgcgaatggagcgatagcgcatggtcttgcccagctcatgttccagttcgcggcggcccttggcataggctttcttgaactcgcgggcctgggcgtccagctgggtcactgacatcgccgattgcttcacatgctccagaaatcgctggtgcagggtggcgctgagcacgtgagcgttgctcttgagcaggttgctttcggcctggctgacctggcgcgcggccaggctcaaggccggaccgtcaaagcgtgccatctgcggattggcacggtacaggcgggtcaggttttcctgggcaatcaacccgtccagcacgggttgtggcaaagcatactgttgcacgaccgccaggcagccgggatcggcctggtgcagctcgttgagcaggggcagggtgtcgggcagttcgtcgagttcttcacgcaggtcgcgcaggtattcggccagctcggccaggcttggcgcggcgtcgaacacacactcttgggcaaccagctcggccaggcgcgcgatgggttggcgcaggctggcttcctggcgcacaacgggcaagctgctcgggttgccccgcaggccttcgacccacttgcgcaacagcggtgatgcgctcagttgctgcagcaaggcttgcaggttgtgcacgaacaggtcgatatcctggatgccgtagcgaccttgcaggcgttgctgctcggcgtgcagctcggcggtggcgcggtgttcaccggccaggttgtcgagcacactgcgcaggctggggcgaatcgcgtgctgactgaagtcgtagcggcgttgaagttcgccacgcaggcgccaccagccgggttgcaaccagcgcagcagcgagccttcctggcgctgtacctgctccagggccgcctgggtgtcctggggctcaagtttctcgcgccagtggcgggtggtttcacgggcgttgtgttgctgcacggccagtgcctgcaagccggcctgttcggcgtgcagcgcttgggaacccgttgagccaggttccagcaggtcgaggtgagccgccaggttggcgccggtcagttgctcggcggcttgagtcagcacgcacgcatccgtcagacgcgtgtcaccggacagcaggctggaggatgactccaggaacgactcgacgctgtccatcagcccactggcttgctccagaaacgccttgagctggccgtaggcatgctcgtgggtgaccaggcttgaggccaggtggctgaaggggtgacgcgcaaaactgtcgaggccgaagcgttccttgatggtctgatacaatcggccggtcagctcctgttgtgcctgccagtgccgccattcgggcaagcgttccagcgcttcgggcggcagctgtgcagtaacgggtggcagctcgatcaaatgacggaccaactcacgcaccgaacaggccaaggactccggcacgccggccatcgcctgttcaaagcgctctatcaggcccagttgctggctcagggtcgccagcgtggcgtcacgccgagcttgtaactgcgatgattgggcatcaccggcgatccagcgctcataacactcacgcaggttgcccacgaaggctttcttgtcggtctgggagtcgtgaatcaggcagcacaattcgcccagttcactctgttgcaagcgatggaacaccacgtccagcgccgcacgcttttcacacacaaacaatacgcgcaggccgcgcgcggcgtagtcggcgatcaggttggtgatggtctgggacttgccggtgcccggcggcccctgaatgatgaagtgacgcccggttcgggccaggctgacagcggcgttctgcgtcgcatcaccggccaccacgttccactggtcgggcagcgggatcgggtctggagtctggacttcgacgtctcgcggctcaatcgagaacatccggtcaaacgcttcgttttgcgcgggctcatcgatcagctgtgcgtagtcacgcaccagcgacatcttgcgatagttgaagttggccagggtcacctgggtcaggtcgatgtcccaggcgtagcggtgcccctgattctcgggcatggcgaaggtgctgttctcggtgctgctggcgaccatctgcggatgctggttgcgcagcacaggtttggcgccgacggccaggcgcaacggtaactcgctgggcagcaccttttgctggaacaattgcaggcccagcgggcggtagtcttcgcggtcgtagctgaaatccggcctgaccaagggcatcgccgaatgctgacgggcgcgacgacgctggaagtggtgcagatgctgcacggccttctggtggatcagttcgatttgcggtttgctttgcaggcgcaactcgacgccgggctcggtcagcttgatctggcgcgcaatatcggcgtggatttcctccagggacgtcttttgcaggtcgacggtttccggcaactggatatcgtagagctggcgcagttgatgccgcagtaccgggttgaactcggcttcggtctcatcgcactgcaacatgaactggtcgcgcacaccctttttgcggctcagttccaccggcagccagagcaggggagtgacgatgcgttcttccggcgtgtccttgaggttgtgccagcgcatgaaggccacgaccaggcgcaggttgctgaagccgaactcggcgcggtcgcggcgggtttcctggatgatgcgttccagcgacgcctgcaaccaggtctggtcttcaaaccgcaaccattgctgcaggccaaccggtttgccgctcaacacctgctcggagaagccaccgaaggtaggctgccaggtgcacaaggcttcggggcggatactttcaacgcgcatcaccaagggcacgctggccacggtcaagttgacgttggcttgcgttggccggaagtacagcaggcgattgcgtcgcgaaaggtcaaacaagcggttacgcagatgctccagcaccacggtgcgccgtgaagccgggccttcggcctgggccaatacacgctcgacatccaggctggccggctgttcgcgccaggattccaggcgccgcaccagtgagccgacatccgtggcgcgttcatggcggttcagctcggtcatttcaacgatcaaattggccagcaccgggttgagccggccgttgagctggaacaggttacggcgatgccgggcaaaggccttgaggtcgttgatatcggcaaaatccaacccgcacgccaggcaggccagcaactggccgagctggaaaatatcggttatctcgtcgtggtgcccgaggcgatgctcccaactgtgcaggtcggtgaggaacaccgggtggtcaatggtctgatgcgggtcttcctggacttgcaggtcggtcacggccacgccactttccgaatcccgggtcaggcggaccttgccgacaatattcagtgccgactccggattaggctgcacctgcttgatcgcttccaatgccagccgtggcgagacgccttcgggattgcgcagttgcagcgtgcgttccggcccttgcagcacatcgagataactgagttgggcgacacgtcccagttcatgcaattgcgcaacctggcgcagtaacggcagcgccaggaacagcacatcgtcgatggggacggcgacgccatcgtgggtctgcagcaattgcgtgaaattgatgggttgggttatcgggtccatgtgtcgacctccgctttgagcgcgcgaacgatcgggtcgagctcacgtttgggtaatttgatatcgcgcttgagcacgttgataaagtcgtcgctactgccgagcttcttggcggtgcgcgccgcgtgcaacaaggcctcatcccgcaggtcgcggtccaccaggctcaggtcgagcatgatgaagtgcaggtattcgtggatgcttgcgtcgacacgctcggcattcagcgtgcccaggtccagcgtggtttcgttgtctttccagtcgggaaagaatccacgtacctgattgagcaccacctccgattgcagcacggaggtgccgatgaagctggcgataaagctgcgggtgagggcggtcagctcgacttggccgatcacatccaaacgactgagcgccagcggcccgcgcaaccggccatgcagccaattgtcggtatccggcacctgccgccaccagctgtccaccgcctgggagcgcagaaacgtctccgggtgcgaaacgccttgggacaaccgtgcatccttgccatccagctcctgggcctgcttcaggtaactggcggcatcgacgctgacgatcccggtgtgaatcttgaccagcgaggtaatcgacgcttccggcccgccggccaccagggccgcgcctcggtcggcatagatttcggtgtgcaggctatataaacgcgcggtctgttccaggctcggaggcgtattcatatcagccatggcgtgattgagaatccgctcggcggtgagatagtcaccaccgtgctcagaccataagcggtaatgggccagctcatgcccgagcagcgccagtaactcctgagcgtcgagccgttcaagaatcggtccgtagaacaccacatgcacttcaccggccaggtaatacaggctggcgttcatcgcgccgtcgccggcttggtaaagcgtcgcgggcgcctggatctgcaagcattgcagcgccgtctcacaggcctgataggcctgcgggtgggtctcggggctcaggcgataggtgtcccgcagcaactgtgcgcgcacatcctgggcatgttcctgctggacgcccagagacgaggcccattcccacacaacaggctcatgggttttcagataatcgaccacacgctggtggtaaggcaagggggtcaggctgctgatatccagcgcgggggtactcatcgttcaaacgtccttgagaggatacggctccatagactgcgactgtgcagcagagacttgggcgggcatcccggtatcagtgatcggcaatagaggcggagcatacctagggggtaggaaaattacttgtgaaagtgcttggatgcgtggccagctgcaaatgcagttagagtggtgatgattatcttgatcgctgtgtgaaaaatgaatgctccgctttttgtttctctggatggccccaaaggcaccggcaaaaccacgttgttggaggctgtaacggcggcactgagggcggaaaacaagaaagtcattcggctttgcgagcgaaaaagcgacccctacaggggtgaaaccatggccctggtcaatgaacttgccagaaatccttcacgggatttggaatgggctgtgtgtgagcgctttgccgagagtcgccgctggatctcccggaacgtactgactcggcagccgttgggcagcattatcctgattgatcgctggtatccctctgaggctgcgtttcgacacacgataccgtttgcagagattctgcagttgaacctggagctaagcgtgcgagtgccggatctgcatgtcggtgttgtcaccgcgccggatatttcatgggcgagagcaacggcacgatcacgaggattgggcggcacagtgattcagaagtatgcagagcatgttgcgtgtaccgaaatgttcgagcaggcggttgtgggtcagggctgggtgttatgccgtaatgaaggtgcgattgaagaggctgtgaagcaggtggttgttgagattcgtaaagtggctgggtgatacgtgtagcgtaatacatgatttaacataatatacattatgcgtaacataatattgcgtaatcaggggcagtgcccgtcagatttcaacaggcaaaaccccctgtcagattcaaacctgagcaaagcctccatcgacaaacatttcactgcccgtcatgaagctgctctcatccgatgccaggaacaacgcggcggctgccacttcttcaggctgaccgatacggcccagtggcacctgcgccgtcatgtcgtcgatgatcgcctccttctggcctgtacctgacaacgccgagtccaggcctggtgtcgagatcggtccgggtgaaagtacgttcacgcgaatgccggtgcctttgagatccagcgcccagcttctggcgaaattacgcaacgccgctttggtggcgctgtacacgctgaacgccgcggtgcccattgtcccggtggtcgagccagtcaggatcacggaaccgccggcctgcatcagtggcaaggctttttgcacggtgaacagcgtgcctttgacgttgatgccgaacgtgcggtcgaacgattcctcggtgatcgacccgatcggttggaaatcccccaggcctgcattggcaaacagtatgtcaacccggcccttggcagctttgacctgggtgaacacacggtccaggtcgtccagcttggcaatgtcggcctggatggcgatggcgtcaggcccgatcagctccagcgccttgtccagctctgactgtctacggcctacaatcaccacctgtgcgccttcagctgcaaagcgaatcgcggtggccaggccgatgccgctgttgccgccggtaaccactgcaacttttccgttgagcttgctcatgatgactccaaaaaagaatgttgaggcgcaactctagatccgctctattcttttgaatagtatgcaccttttggtaagtacccttggaggcacctcaatcatggccaataactcattcaattgcgggctcgaggcggccctggcggtgattggcggcaaatggaagccgctggtgctgttcaacctggcgcagaatgttcatcgatatggagaattaaggcgcgcgattggtggtgtgaccgataaggtgctgatccagcaactcaaggagttggagcgcgatgagattatttttcgcgtggacttccaggaaataccgcccaaagtcgagtattcgctgacgccgttcggggagtccctggcgtcggcgttgggtgggttgtgccaatggggtacgcagcatatgcaaacggtagagcgcatcgccgcacggcggacgtctgccctctcccaatcctgagccccctgccctgatgcctaactcaactaaatgactatttagttgagttaaatcaatggtttacaactgaaatcgatcaaccgactgcgacagcttgccggccaggctggacaattcgtccgttgttgacgctgtctggccaatgacccggctgttgttttccgacatgccggcaatcatctccacctggtgcgcaatttcattgctggccaggctctgttcaccgatagtgcgcgagatatcgttgaccatctccgtggtgttcagggtcgcttgcaaaatctcgcgaatcgcccgctccacctcggtggttaccgccatgcccttgtccacctgagccacgccctcctccatgctggtcaccgcttcgcgggtactttgctggatacgctcgaccatgctggcgatttccagggttgaggcactggtacggccggccaggctgcgaacttcatcggcgaccactgcgaacccccgcccctgttcaccggcgcgggcggcttcgatcgcggcattcagggccagcaggttggtctggtcggcgatccccttgattacctggataatgctgaaaattgcttcggactctttgtccagcgtgcggatcacctgggccgactgctgcgcggagcgggcaatgccgcccatgtcgttgaccacctgatgaatcacccggccaccgtccttggccaaggtttcggcctggttggccatgtccaacgctcgcccggcatgccgagtgatttcctcgatactggcggtcatttcactcgcagccgcggccatggtgctggccgccgcactttgttgctggctgctgccggccacttcatggcagccgtggctcagttgctcgctcatgccattgaccccgtgggcgttgctgcgcaccacttcgatcatgccgcgcagatcccgttgcatggtggcgaggctgcgaatcaatgtgctggcttcatctttgcgctggggttcgacaatcatttcgctcaagttgccccgcgcaatgctggcggcaatacggctggcagcctgcaacggccccatgatgctgagcatgacccagcggccctgagccaacagcagtaaaaggctggcgagcaacaccacgccgagggttaaattggcgttgctgatggtctgctgtgtaccgaggctggtctgctgggtgttggtctcgatcagctcgctcagcgcggccatttgatcttcaagctgggtgaaggcggtgttgaacgttcccagttcattgcgtgcggcgtcgggattgtccagcgccaaggcgacaatgcgctcaccggcggcaatgtagttgtccaggctcggtttgattttttccaggttcgccttgagcgtgtcgtccaacggcagcttgaggttgtctgccagcacctgccgaaagtgctcagcgtgatccttcagggagctgttcacctgcgctttgctgctggtgcttttgcccaggcccaccagcatggctgacagtacatcggcacgcagggcgtcgtgcatcatgtcggcttccatgtgattgcgcagcaccgtcatgctcaactcgttgtcctgcacggcattgcccatccgggtatttcccaggtagccggcaaggctcatgatcaaggcggtcagcaatccggtcgcaatcaacaacatcaagcgcagtttgatcgtcatgcaggtatccccatagcctggacagccggttgggaacccaaccgcttgagcgtctagtaccgttatcggcagccgttgcttattagtgaagcccaagtcagggaatctgcgcgattcccttgtgctcgcgtgcaagggcagctctttgcctcggcgttatcagggctacatcgaagttgtaatgactctgtaagcgtcatcttgtacagccgcaggcggaccactaagctggccgatcccttgaaggtaccggaattccatgtctcgaagcattgcccacctcgccctcctcctgggcttgatcaccgccgtcggcccgttcgccatcgacatctacctacccgcgctgccaaccctgggcgccagcctgcaggcctcgccggcgctggtgcagatgagcctcacggtgttcttcgtcatcgtcggcctgtgccaattgttctacgggccgatcagtgatgtgttcgggcgcaagccgccaatctatgccggcctggtgatttttatcgtgggcagtgtggggtgtgccttggcgccgaccatcgagacactgatcgcgtttcgtgccctgcaggcgttcggcgcctgcgcgggcatggtaattccccgtgccatcgtgcgggacctgtacaccgggcatgaggccgccaggctgatggcgttgctgatgctggtgatgagcgtctcgccgatccttgcgccgttggccggcagcctggtgattgcgctgtggagctggcgtgaagtgtttgccgtgctggcggtgctggcggcggcgtgcctggtgatgaccattgtgcaactgccggaaacccacccggccgaacgccggttgggcaagaccctgggcaacgccttcagcagctatggcgcattgctgcgtgacccggtattcatcggcctgtcagtggtctgcggttttggcctggcgaccttcttcgtgtttatcggcagcgcgccgttcgtgtacatcgagtactacggcctcacacccacgcagttcagcctcggctttgcgttgaatgctgcgtcgttttttgccatgagccaactcactgcacgcctcagtgcgcgctttggcctggcgccgctgattcgttggtcggtaacggccgtggccgccgtgatggccgtcctggcggccacaacactgtggctcgacagcctggccctgaccatgaccctgctgtttatcggcttcggctttctcggcttgctgctgccggccgccggggtactgtccctggaggatcatggcgcggtagccgggtctgcttcagccctgctcggcgcgatccagatgatcatcggtgccgtgtccatgaccctgatcggcgtgttcgccgatcacacgccggcgccgatgctgatcggcatagcgctgtgcgctattgcggcgctgttgaccacgctgtggaccttgcgtcgtttgccagcgcatttggccaacaacccgccctccccctgattcatcacaagtcaaaccgatccaccgcccgccgccgctcattgtcgtcacgcacgtcataactggcggtggtctggatattggtgtggtgcgcgagcttctgcgcgatcgacaggtcatgctcctcgatcacccgggtgatgaacgagcgacggaagtcatggggcatgatcttcacccccacctgttcgccgcgctggcgggcgatgtagtagatggcatgtttggtgatgcgctcgcgagtgatgtggctgccacggcggatacggttgaacaggaagctgtcatcctgctcgccctccttgagctgctcgcgccgaaacgccagccacgcctgcaatttggcgaacgcccagtccggcgcgtacttgatcaactccttgttgcccttgccgatcacccgcaggctgcgttcttcaaagttgatttgcgccaggtcgaggttgaccgattccgacttgcgcatgccggagccgtagagtatgccgatcaccgcggcatcccgcaggccctgggggcgtgggtcggcggcgcagacttccatcatttcgcggatcaggctgcgccgcaggttgcggccctggcccaggcgcgtaccgggtgcagccttgacggtgcgcatgcgcagcaggtgctcctggctgatcaggttcagacgccaggcttcattcatcaccccgcgcaccgcgttcacatacaacgaggaggtattcggtgcataaccgtcctcgcgcagggcggcgaccagggcgatgacgtgttcgggttgcagcaagtgccagtcgatgtcttcgaggttgatatcctcgaagcccaggcggtcggccgcatcttgcagcacgtagcgcatggtcaattggctggagggggccaggcgggtgaggtatagggtcagtgggttgcggatagactcagtcaaggtagatcagcctttggattaaatacctcgaacaagcctttgtttaatcgaggtatttagtgaattggcgagggccgagtctaacccaggaccagccccggcacaaaatcacggggccgtatcgtcgtcctcggtgggctcctgaggctggacctgggtctggctccactcgctgtcctgcttctgcatcaatgcgaaccagtgctggcgcatgaacgtcaggtacgcctccggcgccttggcaaagtccttctcatcgccataacaccccggcaacggcaattcggtgccctgctccttgtactgactgaccagcgcctgctgcgcggccacgctgcagtccttgggcagaggcatgccgcgcagggcgccggcctcttcgtcccaccaggccgcaccgacgcggtcgaccccgcgcagacggtacttctgcgacttgccgacatgcatgatcaacttgaattcgttggggctgacgtcgctggtgcaggtgcgcgaatagcccacggtggcctgggtgatgccgtcgccagagaggtcggtgactttggtcgcagccctatcaaagcgcagggatgcgtcgaattcgcaatgctgcacatcgtcgtagagcatccacacgcgtttggggcggttgccgtcgatcaggtactgggccgcatacacgaacgccgactgggtgccatcgtcatcgcgctcgctgacttgctcggcgagcaccagcaggttcttgccttgtttatcgtcccaggtatacgcagcgatctgcttgccgcgcacttcgacaccgtccggcacctggtcgatgctggtgagcgccactccgtcatccgctcgtacgctggtgacacacgccacgctcatcaacaaccccatcaacaccggccgcaactggccgcgtaaaagctgcacgctattcatccgatcaccctggcaagagacggcttactttaccggcacttgcagggcattgcagagaatattcttcactgaaaacaggattgaataacattgcgtcgcgatcccccccggcgccttgtgcagcaccgcgtccgcttagctgaaccctagctgtctacctgtcaaataaacgagtttttcatctgcgtttcatattcgtactacatttttacgcttaatcttgcccttgttgacttgagggccatccgcgcttctccaactaacccattgattccgctttacctttacgcaatatcgtctttactgcagttcaccaggaagaacacacggccagcgctcaggaatgtcgaatgaacaccacgcacaccactgccttttaatcagttgcctgtactttcgcccactgattgctgctgtttcagcgctccaagttgctctaaccccgaggtcatgaatctttgaaaccctaccctattcattgcgtgtcgatcgttatcccggtctacaacgaacaagagagcctgcctgaattgctgcgccgtaccaccgcagcctgcaagcaactggcctacgaatacgaaatcatcctggtggatgacggtagccgcgacaattcggcccaactgctggaagacgccgccgctgaagacggcagcaacgtggtcgcggtgatcctcaaccgcaactatggccagcatgcggcgatcatggccggtttcgagcagtgccggggcgaagtggtgatcacactcgacgccgacctgcaaaacccgccggaagaaatcccgcgcctggtcgaacaggccgccctcggttacgacgtggttgccaccgtgcgcaacaatcgccaggactcggccttccgccgctggccgtcgcgcctgatcaacctggccgtgcagcgctccaccggcgtggccatgactgactacggctgcatgctgcgtgcgtatcgccgcaccatcgtcgacgcgatgctcgcctgccgtgagcgcagcacttttatcccgatcctggccaacggttttgcccggcacaccacggaaatcctggtgcaccatgccgagcgcgaacacggcgaatccaaatacagtgccatgcgcctgatcagcctgatgttcgacttgctgacgtgcatgaccaccaccccgctgcgcctgctatcgattgtcggcttcagcctggcggcgctgggcatgttgttcgcctttgcattgatcatcctgcgtatggcctttggtgccgaatgggccggcgaaggcatgttcgtgctgttcgcggtgctgttcgtgttcaccggtggccagttcatcggcatgggcctcctgggtgaatacctgggccgcatgtacagcgacgtgcgcgcccgtccgcgcttctttatcgaaaaagtgctgcgcaaccaaccggcagcaccggctcccgtggtcgtcgtcgacggcctggtgtcctcccatacctctacttctgctgatcaggtctaatcatgagttcaaaagctgttgtattcgcgtaccacgatattggttgtgcaggcattgaagcgctgctcagcaccggttacgaaattgctgccgtgttcacccatgccgatgaccccaaggaaaacaacttctacggttccgtcgcgcaactgtgcgcccgcaacggcatcccggtgcatgccccggaagacgccaaccacccattgtggatcgagcgcatcgccaagctgaacccggactacatcttctcgttctactaccgcaacctgctcagcgagccgctgctggccaccgccggcaaaggcgcgttcaacctgcatggctcgttgctgccgaaataccgtggccgcgccccagccaactgggtgctggtcaacggcgagaccgaaaccggcgtgaccctgcaccgcatggtcaagcgtgccgatgccggtgcgatcctggcccagcagaaagtcatcatcgagcgcagtgacaccggcctgaccctgcacgccaaactgcgcgacgccgccattaccctgctgcgcgacgccctgccgcaactggcccagggcaaactggccgaaaccgcccaggacgaaagccaggccacctacttcggccgccgcaccgccgccgatggcaagttggagtggaaaaagccggctgaagaactgttcaacctggtacgtgccgtgacccaaccttacccaggtgctttctgcgccgtgggcgagcacaaactgatcgtgtggcaggccgaagtggtcaagggcaacgaaggcctggcccctggccgcgtgatcagcgtcaacccgctgcgcatcgcctgcggtgaagactccctggtggtcaagttcggccagcgtaacgccgacggcctgttcctggccggccccgccctggcggacgcactgggcctggtcgacggttccgtactgcgcggcgccgagtccggccgcaagcctcgtcgtacccgcgtgctgatcctgggcgtgaacggttttatcggtaaccacctgtccgagcgcctgctgcgtgacgaccgttacgaagtctacggcctggacatcggttccgacgccatcgagcgcctgcgcagccacccgaacttccattatgtggaaggcgacatcagcatccacaccgagtggatcgaataccacatcaagaagtgcgacgtggtcttgccgctggtggccatcgccacgccaatcgaatacacccgcaacccgctgcgtgtgttcgaactggactttgaagaaaacctcaagctggtgcgctactgcgtcaagtacaacaagcgcgtgatcttcccgtcgacctccgaagtctatggcatgtgccaggaccagtacttcgacgaagacacctccaacctggtggtcggtccggtcaataaacagcgctggatctactcggtttccaagcaactgctggaccgtgtgatctgggcgtacggcgacaagggcctgaaattcaccctgttccgtccgttcaactggatgggtccacgcctggatcgcctggactcggcacgtatcggcagctcccgcgcaatcacccaactgatcctgaacctggtggaaggcacgccgatccgcctgttcgacggcggcgagcagaagcgttgcttcaccgacatcgccgacggcatcgaagccctggcacgcatcattgacaacgaaaatggcgtgtgcgacggccagatcgtcaacatcggcaacccggaaaacgaagccagcatccgtcagttgggcgaagaactgctgcgtcagttcgaggcgcacccactgcgtggcaacttcccaccgtttgccggtttccgcgacgtcgaaagcaaggcgttctacggtaccggttaccaagacgtggcgcaccgcaagccaagcatcgaaaacgccaagcgcctgctgaactgggagccgaccgtggagatgagcgaaaccatcggcaacaccctggacttcttcctgcgtgaagccatgctcgaaatcgcggacaagaaataatgcaggcaggcctccgcatcgacgtcgatacctaccgtggcacccgtgagggtgtaccacgattgctcgagtccctggatgaagctggggtgaaagcgacgttcttcttcagtgtcgggccggacaacatggggcgccacttgtggcgtctcatccgcccgcaattcctgtggaaaatgctgcgttccaatgcggtcggcctgtatggcctggacatcttgctcgccggcactgcctggccgggcaaaccgatcggccgcgacctggggcacttgatgcgccaggccaaggccgccgggcacgaagtgggcctgcacgcctgggatcaccatggctggcaggccaataccgggcgctggagcgaggcgcagttgatcgagcagatccgccgtggcgtcgacaccctcagcgacatactcggtgagcgcatcgactgttccgccgccgccggttggcgcgcggatgaacgtgtggtgcaagccaagcaagcttttaactttcgctacaacagcgattgccggggcaccagcctgtttcgtccaaccctggccgatggcagtgcgggcaccccacaaattccggtagacctgccgaccttcgacgaagtcgtcgggccggtggtggctgccaaagacttcaatgggttcatcctcgaccgttttgccgcgtcgaaactcaacgtttatacgattcatgccgaagtagaagggattctgatggccaacgattttcgccatttgctcgcccaggccgggcagcgcggcatcgacttcaaaccactgggcgagctgttgccagcggacgtgaccaccctgccccagcaacagctggtgcgcggtgcgttgccgggccgcgagggttggctcggagtgcagcaggcatgatccgccgttgggccttgccccttctgctgttggcgtttggtgtgttctacctgctgccgctggctacccatggcctgtggattccggatgaaacccgctacgcgcagatcagccaggaaatgctgctgaccggcaagtgggcttcgccgcacttcatgggcatccgctacttcgaaaaaccggcggcgggctactggatgatcgcgctgggccaggcgatcttcgggcagaacctgttcggcgtgcggtttgcctcggccctgagcacgggcttgagcattctgctggtgtacggggtgtcgcgccggctgtggaatgacccgcgcaaaaccctggtcagcaccgtgctgtacatgagttttgtcagcgtggccttgctcggtggctacgccaacctggatccgcagttcaccttctgggtcaacctgaccggtgctgccctgtggttctgcttcgacagcaccacccgcaacgggcgcctggggtcctgggcgttgctcggcctcgcctgcggcatgggcttcatgaccaaaggctttcttgcgtggttgctgccggtgttgatcgccctgccctatgcgatctggcagaaacgtttgcgtgaactgctgggctatggcgtggttgccgtggtggtggcgattgtcgtcagcttgccgtgggcgctggcggtgcacctgcaagagccggactactggaatttcttcttctggcacgagcatatccagcgcttcgccggtgacgatgcccagcatgccgagccgttctggtattacctgccgctgctggttgcgttctgcctgccgtgggtggcgctgttgccgtccaccgtcaaacaggcgtggcgcgacaaacgcagcgcaaaaatcggttttatcgtgctgtggctactgatgcccctggccttcttcagcctggccaaaggcaagctgccgtcctacatcatgccgtgcctgctgcccctggccttgttgatgggcaataccctggccgacaaactggcccagggacgcagccgtgcgctgcgcatcaacggctggctgaacctgatcatcggcgtagtggcattgctcgcgctgacctgggtgcaattgaagaaaccggtgtacgagcacggccaggaaaccctaagcctggtgctggtgttcacctttctgtttgcctggatcctcgtcaacctgttgcaggcggcccggccgttgcacctgtgggccgcgccggtcctcggcagttggctgatggtggcattgctgcccgccgcgttgccgcactcggtggtgtacaacaagactccggaccaattcatcatcgaccacctgcaggaactgcaaccggccacggccctgttgagcaatgacctgggcgcagcgtcggcactgtcgtggcgcctggcgcgcccggacgtgacgctctacaacaccgtcggcgaagtcaaatacggcctggcctacgcggacgccacgcaccacaaggtggataccacccaagtccagcaatggatgagcattgcgcgccaaaagggcccggtcggcgtggtcatgcgggtcaagggcgatgacgaaatcgcagaagtcgacttactgcccaaggacggcaagcgctacgaacaaggcaacatcgtgatcctgatcttcccgcaggctgcgcaatgatcaccttgctgctgttactggccgcctgcctgttcacctgcatgggccaggtttcccagaagttcgccgtggaaagctggcgcgacctgccggatggctgggcgctgaaactgcgctcgccctggttgtggtcggcgctggtgtgcctgggcctcggcctgctggtgtggctgctggtgttgcaacgcctggaagtcggcattgcctacccgatgctcagcctcaacttcgtgttggtcacgctggtcgcgcgttttgtattcaaggaacacatcgacacccgccattggctgggtgtggcgctggtgatcggtggcgtcgtgctgctggggcgccaggtatgagccgggttcagggctttgccctggccctgggcagcgtcggcctggtcagtgccgcccaactgggcatgcgctggagcatgacgcgcctgccgctgcccagcgaatggctggacgccttcagccagaacagcatcgacctgggcgccctcggcgtcgtgaccctggcgatcctggcctacgcgctgtcgatgctctgctggcttggcgcgctcaagcatttgccgctgggccgcgcctattcgctgctgagcatcagctacgccttggtatacctgctggccgccagcctgccggtgttcaacgaacatttttccgtttcaaaaaccctgggggtggcgctggtcatcctcggtgttctggttatcaactctcgtcgtgctagcgccacaagtcccaggaatgccccatgaaaatcagtgtatttggtagcggttacgtcggtctggtgcaggccaccgtgttggctgaagtcggccacgatgtcatttgcatggacgttgacaagaacaaggtcgagtcactgcaaaaaggccatgtgaccatcttcgagccggggctggctgcgatggtcaaggagaacctggagagtgggaggctgcacttcacccatgatgaaaagttggcggtggaacacggcgaagtcctgttcattgccgtgggcaccccttcggacgaagacggctcggccgacttgaaatacgtgctgtcggtaggcgacgccgtggcccgccaccgcaaagagccggtgatcctggtggaaaaatccaccgtgccggtcggcaccggcgacaccctgcgcgcccacatcgaaaaagccctgcacctggccggccggcaccttgagttcgatatcgtctccaacccggaattcctcaaggaaggctcggccgttgccgactgccgccgcccggaccgcatcatcatcggttgtgagcgcgaagaagtgcgcgacgtgatgcgcgacctgtacgcaccgttcaaccgcaaccatgaccgcatcattttcatggacctgcgcagcgccgaactgaccaagtatgccgccaactgcatgctggcgaccaagatcagctttatcaaccagatcgccgagctggccgagcacctgggggcggacatcgaagccgtgcgcctgggcatcggtgctgactcgcgtattggctaccactttatctaccccggctgcggctacggcggttcgtgtttccccaaggacatgcgcgccctgatccacagcgccaagcaagccaactgctccagcgacctgctggaagcggtggaagccatcaaccagcgtcagaagagcaagttgttcgaacggatcaatgcgttcttcaagggcgacctgcgcggcaagacctttgccctgtggggcctggcattcaaacccaacaccgacgacatgcgcgatgcccccagccgcgtgctgatggaagccctctgggccgccggcgccaacgtacgtgcattcgacccggaagccatgcaggaaacccaacgcatctacggcgatgacccacggctgatgctcatgggcaccccggaatcgaccctgggcggtgcggatgcgctgatcgtctgcacagaatggcagcagttcaaggcgccggacttcgacctgatccaccagcgcctgaaaaccccggtgatcttcgacgggcgcaacctctacgacggcgagcgcctggcgcgcaaaggcttccagtactacccgatcggccgaggcgattcctgccaactgccgattccccagcagcaatgggtagccctgggtgcaggccaggtcgtggaagcctgagacgtgaacagagttcaaccgtccccgctgaatgcgacgattcgccgccaatccctcggtttgggattgctggcgttgttgctgtttatcgccggcaactggcaccaggcgatcattggcttcgactcgcgcttcgtgttgtttgcccaggaaatgctgcggcatggccccagcgtcttccccaccacctatgggcagccttacgcggattacctggccacctcgacactgttgacctggctggtttcattgcccctgggccaggtcaccagcctcacggcctggttgcccacggcgatcgcctcggcgtttatcgtcaccctggtttatcgcctgacggcgccctactccccgcgctgggggctgctgagcattgcgctgctgttgttgagcagcaacttcatcagcgaaacccgtgcggtgtccctcgaccagatgctggccgccatcgccctggcggtgttctacctgggttatgcccatgatcacttcggggcggctaaacgcctgcattggctgtacctgatgctgatcctggggtttgccgtgcgcgggccgattggcctggtgattcctacgggcgtgctctgcagctactacctgatcaaccgacaatggcgccagctgttcagtttcggcttgctggccctggcgctgctggtggcatgcgtgggcctgctgttgctgatggccaagttgagcggcggcgaaagcttcatgcaggacgtgatccgcatgcagttcctcggtcgcatggatggcagcgaaggctcgagcggcacgctgtactacttcaccagttcgctgggcaactacgccttggcgtatccgatggcgctgctggtattgctggccatgctgctcagcgggcgccgcgcgccgggaccggcattgcagttggtgtggtattgcgccgccgcgggcttgctggtgatggtcggcctgtcgattccccaggcgaaaaaagcacgttacgtgctgccgatgttgcccatggcggcgatcattgcggcgtacccgttccaggtcgcacacggacggctcttcgccgggctgcgtgggctgctgctggtgatctggacgctgctgccgacgctgttgatcatcggccttttattggcacgaccgcgctaccctgagcagttgagccatctgggctgggtgttcggcgtgctggcgggcctgcaggtggtggccttggtgacactcttcaagcgccgcctgcgtccggtcggcccggcctttgccgcggtactggcggtttgggccacctatatcctggtggtcgagccgctggagcgcagtatctacgacacccgcacctttaccttgcaggttcatgagcaggtgatgcagcagcgcgcgccggtggtgctgcatggcttgggcaaagacgccaaggccatcaagtacatggtcaacctcgactgcgaccaggtgccgttgttcactcagcaagccgccgacctcaagccactccagggacccgcctggctggtgatgagccaagtggattacgaaggtttgcaagacccgcgctttcggtccatcacgccgaccctgaccggcgaattcgaccgtaacccttacgtgctgctgcacctggccaaacctgtgcaaccttgagcctgcgccggcactgccggcgcggaaacttcccacacagctttacgtaataactgctgccgtttctctttcctgcgcccaaaacccgacggtaaactcgcttgcctggtgcggtattcatgtaccgccacaggtcatgggtgaccacaaggacgagaggacaacgccgtgccagatgatgcttcgcttgataacccagccttgaccagcaccgaagtgcatgtcggctacgttcccctgccaccgctggaccggctgatgggattgcgcgacgcgttggtggcgttgaaaggcccgctggccagtgaacccggtttgcaggagaacctgcgcaagcgttttttcgatgaagaactcactaatcgggtgctgggtaaagtctgctgttcgatagccgtctgaacgtattccaattcattatttttgcattcaaccctcattaatatgcattggcgcctctgttccacgcgcggcacactgcatgggttccttcccccaaatgttggaactttcaaagggcttttccgggcaaccagacaagccttttttttgcccgctgtttatggactgccttccaatgctcgctcgctggttccccgctgctatcaacacccgccccaccgaatggagccgtgccgcgatcggtatggcgcttggcaccttgttcagcgtctggttgtgctctcaggtgtttggcatggatgtcgcgctgcacctgcttggcccgctgggtgcgtcggccgtcttgttgttcgccgtgtcatcgggtgccttggcgcagccctggtcgattatcggcagctacctgtgcgcaggcgtgattgccttgctggtgacgcgtgtcctcggcccgtccctgggctgcgcctgcctggcggctggcatgaccgtggtgctgatgtgctggttgcgctgcctgcacccgcccgccggcggcctggccatgacgctggtcctggcagacccggcgtcagcggcgctgggttggtatgaattgggcgcggtattgctcggcgcaggtgcgctgctggcctgcgcactggcgtacaacaacgccacgcgcacgcgttaccccaaaggcgcggcgccagcgccggcacctctcccgttcaaccccagagccggccgagaccctgccattaccgccgctgatttgaaactggcactggcggacatggagcagttctacgatgtggagcccagcgaactggaagagctgatccacgccgcggaaacccacgccaggcgccgcagcatcggtgaaacactggccagccgggtgccttgagcccggcgcgtgcctactgcataaatgcaaaaacgacctgcaggattgaaggttgtactgggcaaatttgcactggtacgatcgcgagaaggttcatccgtgaacatcttgataaagaacaataaaagcagggagttatcgatgactgctcaggtttcatccgaagcaagccacgccgaaatacttcaggacgaagtcctcgccgaggtccgcaaccacatcggccacctcaccctcaatcgccccgccggcttgaacgccatcaccctggacatggtgcgcagcctggcgtcccacttgcaggcatgggccgatgacccgcaggtgtatgccgtagtcctgcgtggcgccggtgaaaaagccttctgtgccggtggcgatatccgctcgctgtacgacagtttcaagaacggcgacaccctgcatcaggactttttcgtcgaggaatacgcactcgatctggccatccaccactaccgcaagcccgtcgtggcactgatggacgggtttgtcctgggcggcggcatgggcctggtgcaaggcgctgatctgcgcgtggtcaccgagcgcagtcgcctggcgatgccggaagtagccatcggttacttccctgacgtgggcggcagctacttcctgccgcgtatccccggcgaactggggatctacctgggcgtgaccggggtacagatccgcgcggccgacgcgctgtattgcgggttggccgattggtacctggatagccacaagctcgccgacctggaccagaagctcgaccgcctgcaatggcacgactcgccgctcaaggacctgcaaggcgtgctcgccaaactggccgtgcaacaattgcccgatgcgccgctggccgctctgcgccccgccatcgaccactttttcgcgctgccggatgtaccgagcatcgtcgagcaactgcagcaagtcacggttgccgacagccatgaatgggcgctgaccaccgccaacctgatgctgacccgctcgcccctggccatggcggtcacgctggagatgttgcgccgcggccgccgcctgcctctggaagactgttttgccctggagctgcacctcgatcgccaatggttcgagcgcggcgacctgattgaaggtgtgcgtgccctgatcatcgacaaagacaaaagcccacgctggaacccgcccaccctgcacgggctggccctcagccacgtcgagagcttctttcatcacttcgagaaggttgcgaaataagccatgcaagacattgaatacacagaagaacaagtgatgatccgcgacatggcgcgtgacttcgcccggggtgaaatcgcaccgcatgcccaagcctgggaaaaagccggctggatcgacgacgccctggtcgccaagatgggcgaactgggcctgctgggcatggtggtgccggaagaatggggcggcacttatgtcgattacgtcgcctatgccctcgccgtcgaagaaatttccgcgggtgacggtgccactggtgcactgatgagtatccataattcagtgggttgcgggccgattctcaactacggcaccgatgcacaaaaacagacctggctggccgacctcgccagcggccaggcgattggctgcttctgcctgaccgaaccccaggccggttccgaagcgcacaacctgcgtacccgtgccgaactgcgcgacggccagtgggtgatcaacggggccaaacagttcgtcagtaatggcaagcgcgccaaactggcaatcgtattcgcggtgactgatcccgacctgggcaagaaaggtatctcggcgttcttggtgcccaccgcaaccccaggattcgtggtggatcgtaccgagcacaagatgggtatccgtgcgtccgacacctgcgccgtgaccctgaaccagtgcagcgtgcccgaggccaacctgctgggtgagcgtggcaaaggcctggccatcgcgctgtccaacttggagggtggccgcatcggtattgccgcccaggcgttgggcatcgcccgtgcggcgtttgaagccgcgctggcctatgcccgtgatcgggtgcagttcaacaaggcaatcatcgagcaccagagcgtggccaacctgctggccgacatgcaaacccaactcaacgccgcacgcttgctgatcctgcacgccgcacggctgcgcagtgccggcaaaccctgcttgtcggaagcgtcccaggccaagctgtttgcctcggaaatggccgagaaggtttgctcatcggcgatgcagattcacggagggtacggatacctggaggattacccggtggagcgttactaccgggatgcgcggatcacgcagatttacgaaggaaccagcgagattcagcggatggtgattgccagagagctgaagaactaccaactctgactgccaatgtgagaggggggcaagccccctcccacatttgatactcagtgtctttgacaccgggttatttgtctttgaactccggcgcgcgcttggccacgaacgccgccatgccttccttctgatcctgcgtggcgaacgccgcatggaacacccggcgctcaaagcgcacgccttccgacagactcacttcaaacgcgcggttcacgctttccttgaccatcatgctgatcggcactgacttgccagcaatcagcgtcgcgactttcagcgcttcttccagcaattcatcggccggcacgatgcgcgcgacgattccgcaacgctccgcttccactgcatcgataaagcgcccggtcaggcacatttccatggccttggccttgcccaccgcgcgggtcaggcgttgggtgccgcccatacccggcagtacgccgaggttgatttccggctggccgaacttggcgccgtcaccggccaggatgaagtcgcacatcaacgccagttcgcaaccgccgcccagggcgaagccgttcacggcggcgatgatcggcttgcggcggttggccacgcggtcgctgtcgctgaacaggtcgtcgaggtagatctgcgggtaggtcagctcggccatttccttgatgtcggcaccggcggcgaaggcttttttcgagccggtcaatacgatgcagccgatttccgggttggcctccaggccgtccagtgcctggttcagctcgctgacaagttgcgcattcagagcgttcagggcttgcggacggttgagggtaatcagcccgacgcggccctggacttcgagcaaaatggtttcgtaactcatgtatcggctccttagagattgcgtgagatgaccatgcgctggatatcgctggtgccttcgtaaatctggcagacccgcacgtcgcggtagatccgctccagtgggaagtcgctcaggtaaccgtaaccgcccagggtttgcaaggcggccgaacagactttctcggccatttccgaagcaaacagcttggccatcgaggcttccaccagggcgggcttgccgctgtcgcgcagtgcggcggcgtaatgcaccatctgccgggcaaccgcgatttgcgtggccatatccgccaggcggaaagcgacggcctggtgctcgatgagtggtttgccgaagctttcgcgttcccttgcgtaatcacgagccgcttcaaaagcggcgcgggccatgcccaccgattgcgaggcgatgcccacgcggccaccttcgaggttggccagggcaatcctatagccttcgccctcctcccccagacggttggcaacaggcacctttacgtcttcaaacaggatctggcaggtatcggaggcatgctggccgagcttgtcttcaacgcgcaacacgctgtagcccggcgaatcagtcggcacgataaacgcgctgatcccgcgcttgcccgccgccgggtcggtcacggcaaacacaattaccacaccggcgttctgcccggaggtgatgaactgtttgcagccgttcagcacgtaatggtcgccttcaaggcgtgcgcgggttttcaggctgctggcatcggagccggcctgcggctcggtcagtgcgaacgcgccgagcatggcgccgctggccaggggcttgaggaactgctctttctgctggtcgttaccgaatgtgagaatcggcacgcaacccaccgagttgtgcacgctcatgatggtcgagcaggcgccatcaccggcggcgatttcttccagcgccatggcgtaggccaggtagccagtgtcgcaaccgccccactgttccggcaccagcatgccgaaaaagcccagctcggccatttcaccgatggcttccttggggaagcggtgctcgcggtcccactcggcggcaaagggtttcaggcgctcctgggcaaattgccgggcggcgtcgctgatttgcagttgttcgtcattgggcagcatggtgattccttaatacaggcattcgacagccatggccgtggcttcaccaccgccgatgcagatggcggcaacgccacgcttgaggcccttctggcgcagggccgagagcaaggtcaccaggatccgcgcaccggaggcaccgatcggatggcccagggcgcaggcaccgccatgcgcattgaccttggcatgggggatctccagcttgctcatggtcaccaggctgaccacggcaaaggcttcgttgatctcgaacagatcgacttcatccaggctccagccggtcttgctcatcagcttgcgaatcgcccccaccggcgctaccgggaacagccccggttcgtcggcgaaagccgcatgcccatggatcaccgccaagggcctgaggccacgtttctgcgcctcggactggcgcatcagcaacaaggccgccgcaccgtcggaaatcgagctggaattggccgccgtcacagtgccgccttcgcggaacgccggtttcaggctggtgatcttgtccagcttggccttgggtggctgttcgtcatgcaggatggttttctgctctttgcccacggtgacctgcaccgggacgatttctgcggcaaagctgccatgggtaatggcttcttgcgcccgggtcagcgaagcgatggcgaacgcatcctgggcctcacgggtaaacccgttatgcagggcgcagtcttcggcaaaggtgcccatcaggcgtcccttgtcgtaggcatcttccaggccgtcaaggaacatgtgatcaagcaccttgccgtggcccatgcggtagccgctgcgcgcacggtcgagcaaatacggcgcgttggacatgctttccatgccaccggcaatcaccacgtcgacgctgccggccagcagtgaatcatgggccaggatcgccgcctccatgcccgagccgcacatcttgttgagtgtggtgcagcgcgtgcccttgtcgagcccggcacccagcgcggcctgacgtgccggcgcctggccgaggcctgcaggcagtacgcagccgaacagcacttcatccacggcatcgggggcaataccggcacgctcgacggcggcgcgaatcgccgcggcgcccagctgaggcgcggtcaggcccttgaggtcaccctggaagccgcccatgggcgtgcgcacggcgctgacgataacgataggatcggtcatggcaaatcctccttacttggccgccatgcgcaaggcaccgtcgagacggatcacctcgccattgagcatgctgttttcaatgatgtgccgcaccagcgcggcgtattcggcgggtttgcccaggcgcggcgggaacggcacaccggcggccagggagtcgcgaacttcaggggtcatgccggccatcatcggggtttcgaagatgccgggggcgatggtcattacacgaatgccaaagcgggccagttcgcgtgcggcaggcagcgtcaggctggcaatggcgcccttggacgcggcatacgccgcctggccgatctgcccgtcaaacgccgccaccgaagcggtattgatgatcacgccgcgttcgccgtcggcattcgcttcggtttcggcgatggcggcggcggccaggcgcagcaggttgaagctgccgatcaggttaacgttgatcacctgggcaaaactcgccagcccatgggggccgttcttgccgaggattttctcgccacgcaccacaccggcgcagttcaccagcccgtgcaaaccgccaaacgccgcaagcgtcgcctgcaccgccgcttcggcagccgcttcctggctgatatcggccacgcagctgcgagcgttgtcgccaagttgcctggccttggccgccacggcgtcggcattcaggtccaccagcatgaccctggcaccggcgccaatcagcatctcggcagtcgccgcgccgaggcccgatgcaccgccgctgaccaggaagctcttgttttcaatctgcattgttgtttccttgaacggtccgaattgtcggaatagtcgccccgcagccgccacgcggcaatggtcaaagccttcaacctgcctgactgttttggccagtcatcgaccgcactgatcatccggtcggcccaagcgattggacgctggcgacgcttgcttctaacctgatggcctgcgccaccaaagaagcccccctgcatgatagtccgccccaaacccaatctccttggcatcctgttctcgctcaagggttcgattgccaagcgtatcgccctgcgcagcctgctggtcacgctgctggcgtcggtgatcgtgctggtggaaaccctgcacccggcgtacttctccaaggtcaatgccacgccgttcaccttgctcgggctgtcgctgtcgatcttcatgagttttcgcaacaacgcctgctatgaccgctggtgggaaggccgcaagcaattgggacagatgatcatcgatgtgcgttcgctgatccgcgaaacccaggtgctcactgacccggctgagcgtgcaggcctgctgcgcagcctgtgcggcttcgcccacggcctggttgcacgcttgcgccatgaggatgaagcctgggccatcaagccgtggggcacgttccaggccaaccaccccaacctccccgatagcctgctacaacagctgggcgcgcggttttcgatgctcgccgagcaaggtgtgatcagcgagtggcgctacacccaatgggaaacccgactggtgagcctcagccaggtgcaggcggcctgcgagcgcatcaagagcacgccgctgcccttcccctacaccctgctgctgcatcgcaccatttacctgttctgcattttactgccgtttgccatggccgagccgctgggctggttgacgccggtgttcacggccattgtcagctacacgttcttcggccttgatgaaatcggcgatgacctggaggacccgttcggtttcgatgaaaacgacctgccctgcaatgccctcctgcgcaccctggaacgcgaagtattggccgccctcggcgaaaccgatctgccgccgcctctggaaccggtggactacgtgctcacctgacgcgggtttgacacccgccgtagtctgaccgaagctggcggctttgctgccctcgctttcggacgcctgcatgtcaaagtcacgccgttattccatcgtcggcctgtgcgccctgctgttgattgtgctgatcacctggtatttctctcgcaccaccccggtagccgtacctgcggccatcgcccatgggtattcaaaagccttgaaacaggcgcgcaacggtgagcccggagcggctcgcgtgctgtatcagcaacttggccggccggatctgtcccccgagcgtcgcgctgcgttgcatgccgaactgccgaactacccaagcccccaggccctgaaactggcagacaaggacctggccagcgaatcaccgctggtacgcgaggccgccatccacagtattgtcggcctggtgccaaccggccaacgcacgctgctgctcggcccagtgctggatgaccccgagcaggatgtgcggtttgccgccgccaacgccttgcttggcctttcgcccgacaccctgggcctgtacttcgggccgttgcagcaggtactggatgaattcgtgaaaaagctcaaggcccaacccgaaacggccgaaggctggattcaactggcgcgcctgtatatccacagcgccctgttgccggaggcgcaaaacgcgcttgagcaggccatgcgcctgcaaccggataacttgcaagccgtggtcgcgcagatcgagttgctggacaaacaagccaagaccgaggagtcgcgccaactgttggcacgccaattggccgcgcatccggagtcagcctacctgcagcatgcgctgggcatgtggctgctgcatcatggcgaacgtccgtacgccctgctcggcctgtccaaggccgtggagctggagccggacaatcaggattaccgctacgacctcgcgaccacgctgcatgcgcaagaggaactggaggctgcgcaacgccagttggaagaaatcatccaacgccacccggccaatcgcaaagcccgggttttgctggtcaattactggaaagagagcggccaactgcagaacgtccaggtactgctcgcgcagcttgagcaacagaatccggacgaccctgcattgcagcaaggcctgtaggccgactcagaatttgttgaaccgccacaaagcgctacggtcaagagaatatggcacgtccacatgggcgtgcatcctctactcgtatgtgacctgagggcacttcttgtctacatccaaagcgcagttatccgaaaaagcggccatcggcattgaaggtcttgatgacattcttgccggagggctctcgcgcagccacctgttcctgctggaaggtgagcccggcacgggtaaaaccacggtcgccctgcatttcctgcaggctggcgcccgcagcggcgagcgatcgctgtacatcaccctgtcggaaaccgaacgcgaattgcggcaaggcgccaagtcccacggttgggacctggatgacaacattcatatcttcgaactcacaccaccggagagcctgctcaacgctgaccaccagcagagcctgctgtactcctccgacctcgaactgggcgaagcgacccgacaaatcttcgaagtggtggaacgggtcaagccgacccgggtagtgatcgacagcctctcggaaatccgcctgcttgcgcaaagctccctgcgttatcgccggcagatcctggcgatcaaacactattttgtgcgctacgacgctactgtcctgttgctggacgacctgaccaccgagtccctcgacaagaccgtgcacagtgttgcccatggtgttatccgcctcgaagaactgacccccaactacggcgccgaacgccggcgtgtacgggtggtgaagtaccgcggccagaaataccgtggtggcttccacgacttcaccatcatgcaggacggcgtccatgtgttcccacgcctggtggcggctgagcatcgtggcggttacaagcgcgagaccctgagcagtggtatcaaggcattggatgccctcatgggcggcggcgtcgagaccggctccagcagcctgatcctcggcccggccggtaccggcaaatcgctgatctcgatgattttcgccgccgccgccgtggcgcggggcgagaaagccgcgctgtttatcttcgatgaagagctgggtctgttgttcgaacgcatgaagaacatgggtatcgacctggcggccctgcaggcaaccggtaacttgctgatcgaacaggtcgatgctgccgagttgtcgccgggcgagttttcgcaccgtgtaagacgctgcgtggatgagcgcgggatcaagaccgtggtcattgacagcatcaacggctaccaggctgccatgcctgaagagaacgcgctgatcctgcacatgcacgaattgctgctgtacctcaaccgcaggggcgcggccacgttcatgaccgtcgcgcaacacgggctggtcggcgacatgcaggcccccgtcgacatcacttacctggcggataccgtgatcctgctgcgttacttcgaggcattgggcaaggtgcgccgggcgatttcaatcatcaagaaacgcaccggctcccatgaggccactattcgcgaataccggatcggcagccagggcatgaccgtcggcgaaccgctggataacttccagggcgtactgcgcggcatcccgacctacatgggcgccggctcgcccctactcaaggatgaggacgcgtgacgggcctctctccagtctccgagcgagcaattgtattggcgccgatggggcgtgacggctcattggcgctgatgatgcttaacgaagccggctacagcggtatcgtcgccagcaacctgggggcgttgtgcgaggcgctggaagacggtgcagggctgctgatcattgccgcggaggccctgcgcggggtggacctggaaccactgttggagtacctgcatcaacagccggcatggtcggatctacccatcgtactaatgacccatcatggcggcagcgagcagaatggctcatcccacctgagcggcatgctcggcaacgtgaccttcctggagcggccgttccatccggtgaccctgatcagcctggtcagcgccgccctgcgcggccgccgccggcaatacgaagctcgcgaccgcttgatcgacctcagcgaaagtgaactgcgcctgcaacgcacgctggagacccttgaacagcaagtcgaggaacgtaccgcccaactgcgcagcaatgaagaggcactgcgccaatcacaaaaaatggaagcggtcggccaattgaccggcggtatcgcccatgacttcaacaatatgctcaccggcatcatcggcagcctggagctgctgcgcaggcgcgtggcccgtggcaagttggacgatctcgacagcctgatcgacctcggggtgacctcggccaaccgtgccgccggccttacccaccgcctgctggctttttcccgccgccaatccctcgattccaaacccgtggagatcaaccgactggtgacctcgatgggcgaactgctgcaacgcagcatcaacgaaagcatccacctggacatgcgcctcgcggacgccctatggacggccgaggccgatcccaaccaattggaaagcgccctgctcaacctggtcatcaatgcccgcgacgccatgcccggtggcggcagcctgtccgtggagaccaccaaccgccacctcgacagcgtgttcaccgctgcctacggcaccttgaaacccggtgactacgttgagttgagtgtcagcgacaccggctgtggcatcccggaaagtgtgatgggccgcgtgttcgacccgtttttcaccaccaagcccatcggccagggtaccggtcttggactctcgatgatctatggctttgcccgccagtcccatggacatgtgaccatccacagtgaagtgggaaaaggcaccaccgtgagcttgttcctgccacgcttcttgggtgaaatgggcactgccaagccccctgaccccgcgatgccgccgttcgccattgcaggggaaacggtattgatcgtcgaggacgacccagcggtgcgcatattggtcagcgcggtgctcaaggaactggggtatgcctttgtcgaagcgggcgatgccgatacagccgtgcctatcattgaatcagaccagcgtatcgacctgatgatcagcgatgtcggcctgcccggcatgaacggccgccaattggcggaaatcggccggcagatccgccccgcgttgaaagtgttgttcattaccggctacgccgaacatgcggcggtgcgcggtgggttcctcgacccggggatgcaattgatcaccaagccatttacgtttgatttattgaccaccaaggtcaaggagatgattcaggcctagacaggtccatctgatgcacaagaaacaggcagtcgtaacagggtctacaaaagagatcccctggaaacaatgcgacattcataagtaagaaaactttggaacgaagtggggtgtttttctcacgcagtgctggcgcaaagcgtacgaataaacacccgatcactagttttcacggatctttcttatgactgttacttcttatctgccccgatctccccatcctgtctacccgccggtaacgcagagtgcatcgccaattgccatgagccaggccccgacagccgctgccacgccacttgctggcgaaacaccccaggccaaaggcgatggggagttaaaaaatgagattatcaaatcgttaattcaatatcagtcgtcctctactcccaaacccgttcagagcatagatgtaaccaacatcccatcgcgctcttcctacgggcaacagctagcactgcacgacggtatcgttaatagcaaggccttcaaacagtggaagatcgataaccaactggatcaggcagacacgttaaccattgacacccaaaaagggaccatcactggcatcacttacggtaagaattatcaggtcaaaaccgttgaccttcacaccttcgccgggtggcctttgctcctgtccgctaccaaggcactgatgcccgaagaaggccgtttgacgctaagtggcgcaggtgatgcaaaaacaacaacggccactaagttgcataacatagcgcgcttttatggcatagagttcccctctttggaggaatatctaaaagaaggcccgggcgctcagctgaaggcagtcagactcctgacctcaaaactctcaacggaaactatcacacccgccaatgcctccgatccctttaaggaagacttgagtcaccaaaagacccagctagcggacctgaacaaccgttttcgaatgagtacggcgttggcttccctgcctcacactactcgccggtcctcggcaaacgatatatacgaagatatggtcgcaagcagagtctacgtagaacctgaatcgtcctatgctcccaaggtcaaccagccgtacaccccgcaagtggacctggtctcgttgatggaaggttatggcataacccctcccaaatcgtatgaagaggtagacacattaacgaaagcactgcaaagcccacccctgagaacgcccgctcatggcaatttggcaggtgcgctgacgcacttgagcattgaagatcagcgcgtgtttcaccaggtcatcaaggaggccctgagccccgaggaagaaacgtccttactggaccagttgacccgtggtattgaatgggatgagaaggcgttcagcgacagtcctcgtctcgccatcgatgcaatgcttaagtcacctttcgctcaaaagttagcaaaagcggctgaagagcgtctgggtaaacttgcctcgcccgacgctatcagcgactgggctttggaagcgattcacacggtgctgggtccgcatgaagatttggaaaaatatacgaccccgaaaaccctcggacttgcaacgttcattatgtcctcgcgcaagtccccggaaagcctggtcaagaataaacctgagttcttgaccaagggcactcattccggggtcagctttgccaccgcatttgcacgtaccgaagcccaggctcccggagctacaagcaacatgacgtatgccgagatcatgaagcgcgctgatctcccccccgtcacactcgcagaccgaatgattgagcaacaggcccaaaacactgccttgaaagactggggtgtgattaacggtgtcctcgtggcgaatgatcagggcgaatataccgagtcgcaaatggaacaggtgcgcgatagtttcagtcaacaagtctccgagttgaacgccgcttctgagacgttttcaaaagaaatccccgaccttcataaacgggccgtggacgcaataaaaaaatggaacccacacttgacggaggagcaaatcctgagcaagtcgctggatgcaaccgaccccgaattactggcctttccaggaccgtattcgcttgtggacgtgttccttcagaagactgatcgttacgatacatacaggagggacaagtttacctcccgcgaaccaagcattgatctcgatacagttgtcatccatgccgatcaggcatccgtcatgaaaggcagctttaacacagatattaaatcctacagtgaagagcatgagtcagcgacacgcgcacagactaaatatttgatttcaaatttaagcctggacgaccggcgcattattgaaaatggaaaaataacagtctcaagagaagtccaggtcagcacgaacaattttggcgccagcaatgtaaagcgtgtgtcacacagcagcgtgatcgtgcgcagcgaagttcaggaagaaggtcgcactcgcgtctactcctatgaaatcgacggggccaccaataccgtccgaaaacgtgatgatttgaaggatattacacctggatcgctacctggcgagttccctaccggcctcacgtcgacttacttggagtccatcattcctgatggcgactatacaacgggtttgctcgaccagcatccgtctggcgcttccgacggtgtacccaatagctactttagcgaacggtcgaagtacatcgcggacgccatggtaaaaagtgtcgatataaagggttatgaggactatttgagagggcaaacaacgtttgatactgaagttcccttttatcagaagatcgttgattttttaaaaggacttattccgggttacaacgccgttgaaaacttcgttgccggcaagtggcaggaaggccttgtcgacctggcatgggatgcattcggctttctgctcgccggggcgacggcgacggtaaaagcgggtgcattcgcagctggcggtgcttccaatacattgctcaaagggggtaagaaactggcgcgtggcgctataggcgcgctcaaccccttggatccgcaaggcttgggtttggccggtgtacaagaagtcataaaaacagtgcaaaggccaggtgtcgcgggcagcaagagcttgcccttcagtggcttcaaatttgacgtcgcgaacactttcaagaacgtttcccacgccacgataggaactgccgatcgtggaggtgaaaaacaagaggtcgcggcgactcagtggaatggcaactggtatgccctcgaccccgtcacctataaaccgtatggtcttcccctgaaggatttcgcagccagttcatgatgaactccgccaaggttgttcactgctcccggggacaaccttggcggtcaatgcacggaccgagcacatacgcattgactactttcatcacgccagtaaccgttggatatgctcctgcagtgtatccagatcaaacggcttggccaggatcggcgcattgcgcgtgatcgggctgttgcagtcgaggatctcctgcgggtaaccgctgataaagatcactttcagctccgggcgcaacagcagcgcaggctcggcgatctgcacaccagagatccctcccggcaagcggtaatcggtgaccatcaggtccaggtgcggcttggtggcgaggatttcgaaggcctgctccccgtcgatcgccttcaacacccgatagcccaggccggccaggtattcacccagcacaaacataatggattcgtcgtcctcgacgatcagaacgacatcttgtgcatcttcactcatgggaagcctttgtccggtcaatagctgcaattacgaccatggggtcacgcagaggttgcgtcgaggtgacgattgagttcatgccgtcgcttgcagcggcaggcacaccctgaacaaggcgccctcgcctatccggctctcgacttcgatggtgccgccatgggccgcaacgatctgttcggaaataaacagccccaggcccaggcccgctgcgacctggctggcggacactcgctcgaattgctggaaaatacgcttctggttgtcttcgctgatcccgattccgtgatcgcgcacctctacgcgggcttcgtcatgctcgctgtacacgcgcacttccaccgggctcttggccccgtagcgcagggcattggtcaacaggttggtgaccacttgctcgatacggaactcatcccagtgcccctctaccgggccgtcggcaaccagcgtcatggatgaatccgccgccgcgacctggggcgcgaagttctgcaccaggctgctgacaagctgtgtcaggtcaaaacgtgccggacggatcgacagtttgccggtacgaatgcgtgacacgtcgagcatgtcttcaatcaggcggatcaggctctggatctgtcgctcgtcccggtcgaccatggcgtgcatcttctccagggtgaacgcggcggcgttgtcccgggccaggtgcatcttgcgcaactgagtttcgaggatcagcccattgagcggcgtacgcacttcgtgggcgacgatagacatgaagtcgtcacgcatacgtacggcctgttccagctcagcctgggtggcctgcaggcgcgtcagcagcagttcctgctcgcgccggctgcgttccaaggcttcgacctgcagcttcatggccttgctttggcggtacaggtcgacgaacacgttgaccttgctcttcaccgcatggatatccaggggtttgtgcaggaagtccacggcgccgctttcgtagcccttgaaggcataattgagttcgcggccggcggcgctgacgaacacaatcgggatgttcttggttttctcggtaccgcgcatcagttcggccagttcgaacccgttcatcccgggcatctgcacgtcgagaatcgccatggcgaactcgtgttccagcaacagggacaaggcctcgtcggcgctcaatgccttgaatacctggcggtcctcgcgcttgatcagcgcttcaagggccagcaggttttccggcagatcgtcgacgatcagcagtttggcctggacagtacttaacatggggaatattccagcgaagccagcagtgagccaatgcggctcaacgtcagaatgtgatcgggtgtgtgcagtgccagggccgcacggggcatgacggcgacacgtgcttcagtgggctcttgcaccacagtggttccgccctgctgcttgacgtgggccaggccacgggcgccgtcctggttggcgccggtcaagaggatggcgagcaagcccgtgccgtaggcatcggcggcggattgaaacaggaagtcgattgccggtcgcgaatggtgcacgcggtcctcctgactcagggacaggctgcgatcatgctccaccgacaggtgataaccaggcccggcgaaatacagcgtgcctggcttgagcacttccttgtcgcgcgcctccaccaccggcatggcaacgcggcgatcaaacacctcggccaactggctgcggcgctcgtcgggcaggtgcagcacggtgatgattggcaggccgaagtctgcaggcaattgggcaaataccgtcagcaacgcctctacgccaccggcggaggcgccgatgacaatagcctctatgccccggacctgtgccgggctggcagcctcttgattcatagctttcggtagatccgttcctgtttgaccagcggttcgaattgcttgccatacgcggagaagtccagggtctccttgctgcccagcaccaggaaaccgcgatgacacagcgactcatggaacaatccaaacgctcgatcttgcaattttttattgaaataaatcagtacgttacggcacgaaattaattgagtttctgagaatacactatcggttgccaggctgtgatcggcgaaggtcacattctcacgcagcgttttatcgaagatcgcgtaatcgtaagccgcagtgtagtagtcggcaaatgaacgttgcccaccggcctgctgatagttggctgtataagcgcgtacgttctccagcgagaagatcccctgctttgccttgtccagcgacgccggattgatatcggtggcgtagatgatcgtacgctccagcaacccctcttcccgcagcaggatggccatggagtagacctcctcgccggtgctgcagccggcgatccagatcttgatcgacgggtaggtcttgagcagcggcaccacttcctggcggatcgcgaggaagtgcgacgggtcgcgaaacatctcgctgaccgggatcgtcaggaactgcagcaactgcatgaacgccgccgggtcgtgcaacacgcgctcctgcaaggcggaaatggtcgcgcaatcaaactgacgcaaggcatgcgccacgcggcgcttgaccgacgccccggagtaatcccggaagtcatagctgtacttgaggtaaatcgcctcgatcaacaggcgcagctcaatatcgctgcttttttccaagaaacttcgctccacttaaatgcgttccatcttcggtagccacacgcggatcagtgagaacaggcgatccaggtcgatcggcttggccaggtagtcgttggaaccggccgcgaggcagcgctcctgatcgtctttcatggccttggccgtcaccgcgatgatcggcagctttttccagcgcgggtcctggcgaatcaaggcagtggcctcgtaaccgtccatttccggcatcatcacgtccatcagcaccaggtcgatatcctcgacttcattgagtttgtcgatggcctcacggccgttacgcccgatgaccactaccgcgcctttgtgctccagggcgctggtcagggcgaagatattgcgcacatcgtcgtccaccagcaggatcttgcgcccctcaaagaccttgtcgcggctgcgggcggtcttgagcatcttctggcgatcatgggacagctgggattcgactttgtgcagaaagagtgtgacctcatccagcaggcgctccggcgagcgggcgcccttgatgatgatcgagcgcgaatacttgcgcagttcggcttcttcatcgcgggtcaggttgcgcccggtgtagacgatcaccggcgggaacgagcagatgtcctcggtggccatgcgcttgagcaactcgttgccgagcatgtccggcagcttgaggtcgatgatcatgcagtcatagacattagtgcgcagcaggtccagggcggcctgagcatagccaacgtcggtgatctcaatgtcatcgtcgccgatcaggcgggcaatgctgtcgcgttgcaggtcatcgtcctccaccagcagcacacgcttgaccttctgggtcagcttggcttccaggcgcgcgaacacgtccttgagctcttcgcgggtggtgggtttgaccgcatagccgatcgcgcccatgtgcatggcggcttccacgcggtcttccacggaaatcacatgcaccgggatgtgccgggtattggcgtgttccttgagacgttgcagcacggtcaacccggaatggtccggcaggcgcatgtccagcaggatggcatcggggacatattcctctgccaggctgtagccttcgtccgcgccgtgggctaccaggcagtggtagcccaattcgtgggccaggtcgaagaggatacgcgcaaagttaggctcatcttccaccaccaggatgcaacgcgtggtaaacggggccttgtcgcggtcatcggcgaagcgcgggatcaggctggcatcggccaccggcagcggcgacaccttggccggagccggtgcgggtgccaccaccacttggcgcggctgctcgatcggtgccacgtcttcccccggctctgcataatgttccggcagtaccagcgtaaaggtgctgcctttgcctggggcactggtcacgctgatatagccacccagcagggccgccaggtcacgggaaatcgacaggcccaggccggtgccgccgtagcggcgattggtggtgccgtcggcctggcggaacgcttcgaagatgctttcctgctggtccggcgcaatgccgatgccggagtcgcgcacggtaaaggcaatcccctcctcagatgcacgcgacaccgacaggctgacctcgccctgttcggtgaacttgaccgcgttggacagcaggttcttgaggatctgctccaggcgctggcggtcggtatacagcatagtcggcgtgccttcctgcacctcgacctggaagccgagcttgcgatcagccgccagcggctcgaacatgccgcgcaggccgtcgacaagccgtgccacgctggagttttccgggcgcatctccagcttgccggcctccaccttggagatatccaggatgtcgttgatcaagttgagcaggtcgttgccggcggaatagatcgattcggcaaacttgacctgttcggcgctgaggttttcctgggggttctcggccagcaacttggccaggatcaacgagctgttcagcggcgtgcgcaactcgtgggacatgttggcgaggaattcagatttgtatttgctggagcgctgcaattcttcggcgcgttcctccagttccagctgggcctggttgagctcgatgttcttgcggtccatggcgtcgcgttgttcggccagggtctcggtctgttcggccagttgctcgttggtctgctccagttcggcctgctgggtttccaggtgggcctgggactccttgaggatgcgcgactgttcttccagctcttcgttggcggtcttgagttcttcctgctgcacttgcagctcttcgttgagctgctgggtctcggccagcacttcctgcaggcgctggcggtaacgcgcggcttcgatggaagtgccgatattgccggcaatcagctccaacagctcttcatcgcgctcttccagcgggcgcaggaagcccagttcgaccacgccattgacccgatcatcatcgctggtgggcatgaccagtacgctgcgcgtcgacccttcgcccaggccggaactgaccttgaagtagtccaccggcacatcatccaggcgaatcaggcgatccagctgggccgcctggccgacgatgccttcgtcgctgtagatcgcttgttcccgctgttcctgttcgcgggagaaaccataggtggccacgcgcttgagaccgccgtgttcttcacgcacatacagcgccgcaacggcggagcccatgtactgggcaaagaactgcaggatattgcgcccgagcatattcagggtcagttggccgagcacctgttcggccagttcggtctggccgtttcgcaaccaggcttgttgctcaaggcgtcgcgcaatcttctgttgtgacgcgaggtttgaactgtaactatttgataatgaaacaagatttttacgaccgatgtaggccagaaagccactcaatcccaatacaaatgccaagtacagggtgacgctgatcaccgtggtgcgggtgacgtcttcattgcgggtgatgcgaaactgctgctccatcgccaccgcgtcgtcgtattccttgcggatttcatcggtcaggcgcttgccgcggccggccttgactgcgccgcggtagtcaccactgttgcgctgcatatcaatcatcgactgggcgtagttgttccactcggcctgcagggcttccaggcgcttgaggcgatccacctgctgtgggttgtccgccaccagctcctgcaggttacgcaggtcggcgatgatgcgcggcttggccacttcatacgggtcgaggaaatgctcgtcgccggtgatcaggaagccacgcatgccggtttccaggtccacggtcagcttggacgattcattgaggttattgataacccggtcggtgtgttcaacccattggatcaccgacaacaggtaagtgatcaggcacacgaaaaacaccgcgctgagcacgcccacacccaggggcaatgcaacatttcggctcagcagattacgaaagctcttttcatcgacggacgaagcgggagtcatgggcatgccttggccaagtgcagaaaacccaggagtttgccccaaacttggggttgaacgctatttttatgccaaatactgtcaggtgactcactgccgattgtgagaccccacgtcaaatcaagccactgttttggctgcttacattagtgaacgcggaggcacaggaacgcaggtcgcagggcattgcactcaatgatgcgccttgaaaaaggcagccttgcgcaagcaaatgcgcggataacgtccaacttcaaagggtatccagccatgaccagtctctacgcggtgtccacatcagccctcaacccacccacgcatgcggccaatcaactctatcgactgtcccaacccacctcgtccgaaagcgtcgcagaacaacaggccaacccggcgccacaaccgacttctctcacaacagccgacctctccaacaaaaccctgattggtaatgcccgcaacctgcataccctgtcgcaagcgctgcacaaaattgccaggacactgggacacaacgcgtctcccccggcggtgctgaacgcactcaagaccaccgcaatggacatccacccgcattcatcctttccaacgcagcctgacacccttgtcacactggagagcttcatccgcggcattggcctgggtctacccaccaaccatttttccttgaccgcgttagcggatgccgtcagtgagagagcggtggcgaacccgtttgggaacttcgggggggcactgtcctggcctgtacctttgagtactgacgatcagcgaacgctgcaggcagcggctctccaatacatcaaggatcacgcggaatcaccggagacgggccacagcctgggaatccttgagttgctcaatgacaacaaacccttgacggatgaggccaaggcagaccccatcaaagcgttggagtcgatcctgaacagcccccgagggcaggcgtttggtcgggcaatgcaagcgcatatgaagggtatcgacaccgccaccagcgcccatgactacgccctgccggcgatctacctggccctgaaccccgaagctattaccaacccgcagcgaaaaagggttgaaccgcacctttggggcgctagcccgtcagcggtggtcgatgcgcaggtcaaacccctgatagacgatggccgggttagcccggagatggccgacgttgccgcaacgataatattcggactgacagcgcctgcgtttaaggtaaaaggccttcccgacaatatcacttatggcagcccggcctcggcccgcctgcagatcgcagtggatatccaggaagcgctgtcacccgggtcggcgatgaccatgggcttcgacgaaatcatgatcaaggccgaaaaggccgcccaggtcgatccagcggtaaccgagttcgctcagaaaaccgcactggtcgattggggggttgtcaacggcctgatcgagagaaaggatgacaaacactacacggacctggaactggatgagctgagaacccaatacaaccgcgagttcgcagagcagatcgacgcacagacgttagccaatgctgaaatacccagccgtaaggacatcgccctcgccaaactgaaagaacgttttggtgaaggaattccgtttgaaaaacccctgttgaaactccagacatccggccatcaatcccccgcaatgccgatctacaatccaaacttgcggcctgaagggtatttttcgatgctcgacatcgcgatgatggaaaaccgtggttacacctggacgaccgctgacccgcgtatccccctcgccgcgatcaacgaaaatcctgttctcggtgtgaatgcagcattcaagcaacaattcgacgaggctattgtttcgcgaaagaaaggtctgagtgcgaccgtcaggcacctcatatccaaactccccttggatcaacgcaaagacttggaatatggaaagctgcgcttctttcatgattcggcgtacagaataaatttcatagacaaaacactgctacacaaatacctcaccttttcgataaaaaccgagcgtgacggcgtgtcgtctgtttatgaggtcgacatcaagaaaggcaccatcaccaagcaacgcagcggcaaaaattacgatgagagcacctatggcccaggctcacggcaaattcatacaaccgagttccggccgtcccgctatagccaggcaaaccagaaggaaaacacgggcgacagcgcagtcacgccaaaaagcttcagcagcgaccgcagccaatacattgccgatgcgttcgttgagcacctggatatcgataacgccgatgttgtgaaagcggccaaaggctctacgcagttggacaaacagttcgaagcacaggatcgcgcggccaactttttcctggacctgatcccgttcagatcggccattgtcaacttcataaacggcaactatgtggcgggcgctcttgatctgacgatggatgtcatggggttcctgaccgctggcgcagcgactgcggccaagctggtcaaggtgggggcgatcgccggctctgctgccacaaagctggccaagggcgcgcgcgttattggagcggcgaccctcagtgcattcaacccgctggggggcgcagacgacctggtatttggcggcgcaaggctactgggcaaaagccctcgggcactggagaaaggcatacaaatgctacgtggcacatcagacagttatgggctgctgaaaaacctcagccagcagtacgacatagccgcaataggcagctacaaggtcggcgaaacaaagatccagacggctgccgtattcaacgatggacaatggtaccgctacgacccgatcaaggctcaaccctacggagccccgctggagaacttcacgccctctgtcgcggcctccgcgggggaaatcaaagggttgactgagtcgaggagcatcgagtggttcaccagttggtggagttcctcccgtcccgacgccaaccccaatttcgcaaaggaattcgaggacttgcggttaagcgccttgaaaacggacgccgaaggattcaaccatggttataacagccagacaccgccgtcgattaccgggtactcaacatccctgagcgttgaacagctcaagacactttcactgcaagccggtccaagtgcgcaacagttgggaagcctgattcgccgtatcgaagacttggaagaactgccgaatacgttctataccaaaatggaaaacctcaaaacgctggatgcggacagtttcaagcagggttacaagtacggaacgcccgactcgataaaggggtacaaggaggggttgagagtccctgaactccaggagctggctttgcaacgtggattgacgacgcaacaaatgggctgtctgtaccgacaggttgaaaagcgtgcgatcacgctcaacctgtccctggccaaaaaattcggcgataacatcaaggccgcgggcggagcgttcgtcccgatgccacaaggtttgtacctcagccaagtcagtcctatctcgggagggcagtgcgcggtgtttgctaactcgatggcctatgccattcaggagggcaagcaaaccacgctgttggagaatcttttcacggtaatggctcatcccgagcatcccgccacccagacatttcaaaagactatgcaaagtttccaggccaagctcaggcatgactttcatgtaggccaatacaaacagcagcggacggctgcgcaaatcatcgagcaactggcgaatgccaacacgtcgacccgcctgatgataggtaatacaacacacggtattaccgcaggcgttgtcgtaaagggcggcgaaaaagaatggttctacttcgatcccaacttcgggttggcaacattcaagtccgaggcgtctatgcgcgccggtgtggaaagtgcaatgagcaccggttcaacgagcgcattattccgtccgaatccggggaccttgacctattctgtctcggacttcagtgaattgaacctgatgaacaccgtcggcagcatcaacggcgtgcatgacctagtggccatcccgctatcaatttcctcccccagattggcctcaagtgtcgcctgacgtttgacggggagtaccggcatcatccgattcctggagatgccgcagtcccttgcgagcccggtagaaacccgaccacagactcatacgggacattccttcccaacaccggcacaataccgacctcggtgagggaacttgccgagatcgccgcgactcattagaggatggcctttccaccgctcacggccaatcctttcactctcgggaatttatttatgtccgccaccgcctccaccatccttgtcgtcgaagacgatgccatcgtgcgcatgcttatcgtcgacgtcctggaggagttggaattcaacgtgctggaggccggcgctgctgaagaagcgctggcactggtgcaaaacactggccaagtgatcgacctgatgatgaccgatgtcggcttgccggacatggacggcaagcaactggctgccaaggtccgcgaactgcgtgcggacctgccgattctgttcgccagcggttatgcggaaaacattgacgtgccagccggcatgcaagtgatcgccaagccgttctcgatcgatcaattacgcgacaaagtcaaatcgatgctgcccgcactttaatttcgacctgtacacggtgccgcctgcatgggcggcatttttgcgtcaggtgttcagagattaacgtgaccttcggtcaataacatcggaaactcaacgctattcagacgctaccctacaaaacgcactcaggaaggacgcaacaacatgattggaaaaccgacgcgcctgctgttggcgagcctctcgatactcatgagtaccggcgcctgggccgacttcacggcaactccggccgaagcccgggccattgccaaggaagcctacctgtatgggtttccggtggtggacatgtacaagacgctctatacccaggccgttgacaaaggcggtgccaacttcaaggcgccgttcaaccagatcggcaataccgcgcaagtgttcacgcccaaggacacggccttcgtcacgcccaacgccgacacgccctactcgttcgtctggatggacctgcgccgcgaaccgctggtgctgaccctgccctggatcgaagacgaccgctactactcggtgcagttgatcgacctttatacgcagaacttcgcttacctgggcacccgcagcactggtaacaacggcggccactacatgatcgccggccccgactggaagggtcagcagccggtgaatgtcgaccgcgtgatctacagcgaaagcaatattgcctacgccctgtaccgcacgcagttgtttgatgaaaaggacctgggcaaggtcaagcagatccaggccggctataaagtgcagccactgagcagctacgtgaaacaacccgcgccagccaaggcggccaaggtcgaatggccaaagcccacggcgaccatgaccgaaggcccgcaattgtttcgctacctgaacttcatgctggccttcgccgcgccgcaggacagcgaaaaagagctgctggcccgctttgccaagatcggtatcgccccgggcgcgccgttcaaggtcaaggagctgaccaccgaacagcgcaaggccctggatgaaggcattgccgacgcccatgccgaatttgccgcgttcaagaaagacaaagtcgacactcaccagatcaccagcggtgatctgttcggcagccgcgaccacctgaacaacaattacctgtaccgctatgccggcgccaacatgggcattttcggtaactcctccgacgaagccacctacatgagctacttcgtcgacagcgaaggcaaacccgccaacggcgcacgccacagctacaccgtgcattttgccaaggaccaactgccgccggccgatgcgttctggtcgctgaccatgtacgacgccaagaccaagcttttggtgcccaaccacaagaagcgctacctgatcaattcgcggatgctgcccaacctcaagcgtgacgccgatggcggcctgacattggccttgcagcaccacgagccaccgaaggccgagcaaagcaactggttgccggcgccaccgggtccgttctacgcggtattgcgcatttacctgcccaagcctgaggtgggtaacggccaatggaagctgccgccgttgacgccgctcaagtaacgccacgcgcccggtcgcaacaatggtgagggcactgcagccctcacctctcgcaagttctagcgcgtaagtttcacgtacgactgatgcaggtccgacgcccagccatcaatcacgcttttcacgtcaccggccttcatcacctgcgaatcgttggacagcggcttgcctgtgcctttgcgcaccacctgggcgagcaccttgccattggcgccatcgaggaactgcgcctcggtgcccagggtggtttcctgatcacggatcccggtgccggtgcttaccgccgccacgacgaaggccaccggaatatactcatagggtttgaggccttcggtcttgctgctcacggcggtgattgctgcacgcaccacgatcacgcctggacctggcgcattggccaggggcagggatttttccagctcacgcttgagtgcctggttgtagtaggtgttgatgccgttgagggtggttagcggaattttcgcggtggcctggggcttagggtagaactgggtcggttcgacgtacaccgcgtgatagcggctcagatccagctcgggatcgacccagcgcatcacctcggcccccgatggagacttggcttccttgagccggctgtagtccgagagaaagccggaatactcatccggcgcggtgatcttgctggcacaccccgccagcccgagcgaagcgatgcacaacgtgcagagcaaatgcctaagtgtcatgtttgaactccctggcggtcgacgttggaacactgagttgtaggtatagccaatcctggcaaaataaccctgttcccatcattcgacgtttcagctgcgttcgcgggggatcaggctttgcaactgcgaggccaggaagttggcgtcgaaaccaaaggtgtccgggtctttgaggccattggtcttcttccacaaccagtcgttcttatccacgggtaataccaacgacacactgccgtgacgtgccgcggtcaggcccatgaccgacacagagatcaagccacccgcgcccatgacatccggcacgaactccaccggtttgccagtgatctgtacggtcagtttctcggtcttgaatgtcgaggtctccaccggcacgctcgggccgctggctacgtaagcttcacggtggacttcaagcaaccccactgtcttcaccggctcaagccactgctcgatctgcccgaacagctcatcgagcttctgcgcccaacgggccgactgcacgtcgaactgctgcttcttgtgcgcttcgctgtcggcgtaatgacgaagcatctcgcccagttgctgtacatcgtccattgcggagttccttgggtgagcctggttgcgaagcctgatcatggcagatgcagccattcgacgtacggcttaaaactgatccgcaacaatgaggtttttctgagcctgttttgttttacccatgcttcctacagtgccgccacttggaaccgtgggaggactgagcatgagcagcacaacaatcggacaggcgtataactataaagtcgtccgccaattcgttatcgccacgatcgcctggggcgtggtgggcatggccatgggcgtgtggattgcctcgcaactggtctggcccgagatgaatctcgatctaccctggaccacttttggtcggttacgccccctgcacaccagcctggtgattttcggttttgccggcagcgcgcagtttgccgccagctattacgcggtacagcgtacttgccaggtgcggctgttttccaaccgcctcgcggcgtttaccttttggggttggcagtcggtgatcgtgatcatgctggtcagcttgccgctgggttacaccaccaccaaggagtacgccgagatcgaattctccggcgcggtgtggatggcagtggtctgggtggcgtacgccattgtgtttttcaccaccgtggtgcggcgcaaaacccggcacatctacgtgggcaactggttcttcggcgcgtttattctggtgattgccatgctgcatgtggtcaaccacctggcgatcccggtggactggttcaagtcctacccggtgtattccggggcgaccgatgccatggtgcagtggtggtatgggcataacgccgtggggtttttcctgactaccggtttcctgggcatgatgtattacttcgtgccgaaacaggtcggacgcccggtgtactcctatcgtttatccatcgtgcacttctgggcgctgatcaccctgtacatctgggccggtccgcaccatttgcactacaccgccctgcccgactgggcgcagtcactgggcatggccatgtcgctgatcctgctggcgccgagttggggtgggatgatcaacggcatgatgaccttgtccggcgcctggcatcagttgcgcaccgacccgatcctgcgattcctggtgctgtccctggcgttctacggcatgtcgacgttcgaggggccgatgatggcgatcaagaccgtcaacgccctctcccactacaccgactggaccatcggccacgtacacgccggagccctgggctgggtggcgatgatcaccttcggtgcgctgtatcacatgattcccaaggtgttcggccgcgagcagatgcacagcgtggggctgatcaacctgcacttctggctggccaccattggcaccgtgctctacatcgcgtcaatgtgggtcaacggcattacccagggcttgatgtggcgcgcggtcaacgatgacggcaccctcacctattcgtttgtcgaggccttgcaggccagccacccggggtttgtggtgcggtttgccggtggtgtgttctttctgaccggtatgctgctgatggcctacaacacctggcgcacggtgcgtgtcgcggacctgaaagtggcgcagcttgatgcgcggatcgcctgagatgtggggcctgctgatggtggtatgcctgtatggcgcggtggagtattgcttgcgcggtcaatcggacaaaagcctggacgacgccagcctgatgcccttcgccgatgacccggaagtggcacggcgagtggagttggcgaccggcaagcaggtgaacgcagtggcaccggaagaggccaaacccgggtggaccaacctggacatgtgaaactgcaccggtcatttcgtgggcaactgcgtatgactaatcaatggtcgatgggtaaggtgaagcgactttccttgtcaggagcatcgcatgcgcaccatcggccttatcggcggcatgagctgggagtccagcgccgagtactatcgcatcatcaaccaacgcgtacgcgaccagctcggcccgctgcgctcggcgcaactgttgatgtacagcgtggacttcggcccggtggaacaggcgcaacatgccgggcgctgggatgacaccgcactgatcctcgaagacgccgcgcgccgtttgcaagccggtggcgccgactgtgtggtgctgtgtaccaacaccatgcatttggtggcgccgcgtatcgaggcggcggtgtcgattccgttcctgcatatcgccgacgcggcgggtgcggctgccgtggaaggcggtacgctgacggttggtctgctcggcaccgcgtttaccatggagcaggatttcctcaagtcgcgcctggccgcccaaggcctgaccgtgctggtgccggaggccgacgagcgtcaggccgtgcacaggatcatctatgaggagttgtgcgtcggcgtgatcagcgaagcgtcacgcaaggtctaccaaggtgtgatcaagtccctggccgcacgcggcgcccaggccatcatcctcggctgcacggaaatcgggctgctgatcaagcccgaacacagcgagctgccgctgctggacaccaccgagctgcatgcgcaggctgcggtggcgttcgctttgcagggctaagccgactggcgcaggcgcgccatgctcacggtgtcgacaaaccggccgtcacgcagggcgtaatcacgcaatacgccttcgacctcaaagccgaacttgcgatacaaccgctgcgccgactcgttgtcggcgtacaccgtgagctccacccgatgcaggttcatccagttgtcggccacgtccagcgcggccgtcaacagccgcgaaccgactcccttgccctgccacgccgttgccacgcccatgccgaacgaaccgacatgggcctggcgcacacgcaggtactgttccaggcccagctggccgatcacctcaccgccatgcatcgctaccagttgcaggcgccgctcgttgtccatcaccaggcgtttgcgccacatctcgaccgactggaaaggcatttgcagcacctgacggcacacggccggttcgttgtagagcgctgcgacgccttcaaggtgggcctcggtgaagcgctggatcacgatatggggttcaggcgtgtgcatggtgtttcatcctttgaaagacacgtggtcgaccagtgtaggggcgacattaagccgatggctagggggctggcacggttgaccacaacgatggccagtcaccgtagccgaccccggtgcaacgcggcatccggtggaactcactgagctgaaagcgcttgccgtcgaacacccaagtggccccgccgccgcagtcaccgatgccacgctgcttgtagaaataactcagggacccggaagcctcgtcatagccgaccgcgccttgcaatgcggcgtcttccaagggcagcggctgcaggtccatcagggtttccgtatagggcgcctggcgctcacggctgctgacattgaactcgcagttgtaggccgcgcagtcataacgtgtcacggtcatggcctggcgcgccgtcagcgcccctgcttttgcctcgggctccccctcttccggcgtgacggcctgcaaggcggcagccaccagcccggcctgctcctgcgcggtcaacggcggtgccggcgaaaacttgcgcagtaccggcgttggcgcccgtggcggcacctcgctggccgcgcccttgccgggtcgagccagggccgtcaggttgtccacgcgaccctgcactgcatccatcaacagcagcgcagcactcaacccgctcagcgatacatgcgcctgttcatcacccggcaactgcaggcgctggccattgcgcagacgctgcaaccagcgccgcgcccctgcgtcatcaatcaccccatacgaatgcacctcgggatcaccgccctggtcatccagttcaacgtgcaattcccgcgtcagctccaggcccaggggctggccgtccagcagcaaggtggaaaggtccacctcctggcctcgataatcaaagcgcagacgcggatacccttgcggacccgcctgatgccagatgtgcaacgtcaatgagctatagtcctcttcatccacgccgctgggtgcgctgagggcgtgacaattgcgcaggttgtcgcaaccgaccacccactgcttgatctcacgcagcagcggtaccgcttcggaggggggttgggcgaagaccggggtggtggcgccggtgagcaacagggccaggaatgcggggcgcaacatggggactctccgtgtcgaaaaggcgcggattgtcccatgttcggggtttgtggcggtagctgtcagggcctggcttggccacgaactcgggctgcgcgcttttccaggtgttgcgcgtgacgctcggcttgctgcttgagggccaggcagtactcaggcaggcaatgttgagcgtctggttttacgacgtcatcggccagacgccgagcggttgcggcagaaataggagtgccgcgtggtttcaaccggcctttgatgatggcagcgcgatcattgaccagcgttggatggttgagtttaagtacttcgacggtggcaatcgcttcgggagtcaggccctctacataaccatcactggagtatcgaaactgccgctcgatattggctgtcagcggggaaacaaacggctttgtcaccgtgttgtaatcggccttttccaccgcgccgtagccgcaagcgactttgctttgactggatggatagcaggcgaccaagtttttgtaagcaatgttgctgtcagcctgttggtgtttttgcggaatgacatgctcaatatggcaactgaactgcgtgccttgatctcgagcctgacactcgaccgctgtcggtagccgtcgcaaggtataggcgcataaatgaaactgttccttcaggagcgcctggcgaaccgcttcgcttgggaaggtacttcccttgccgtagaaaagattgtggggagtgtcgcgatttacccttcgccattcaatcagtcctcgtggttcagagccttttctgatcgacctcacgcttcgccctcctctagcgagcgcaaggagtcaatggttgcttgagcctcaagaacatcgggaattttcccgactctccggtgcaactgcgttaaatatttttgggcggagtcaaggttatcatcgtcaagttcccgatagacctttctgagttgttggctcacatcttggttttgggctaatccccccatgaactcttctataacttcaccactgcgaaggccaagtgagcgctctggatgacctaggtattcaccggttcttaacagcatcacggacgctgctgggagttctcctagtatttgtggcgaatgggtcgtgatgatgaattggcagttggggaatgtcttttcaagatttgcaacaacagtgcgctgccagcctggatggaggtgaagatccaattcgtcgatcagtacaacacctctcccttccagtggatcaggcacctcgcggttgagcagtgtcaaccttcgagccaaatcacctaccattgcgagcaagcacttctcgccatcggaaagctgcaagacgttgaattcgagtttgcctttaagaacagtcattcttagagttggtttacgacgtactctaatatctttgaatccggtgaacgtttctatagcccgtcgaactgctgaaagctcgtgatcccgaaatcctgggaggtcacggctgatttcattttccaggtcttcctggttgcgaaaccagatgaaaaacctcttgaagtcagccccgccgtggccaagggcgtcgtcgtagccttcctcaatagtgttgatcaagcgttcacgaacacgtaacggtacatccagaacagcccgatgaacgtcgtagtaaacggcaagaggcagttgaacggacttgtctcctacgagctcataatgaattgcattgatctcgaacgatgcagcagcgttcttcagcaaagacaaatcactactgcgttctttagggtgctttccagactttcgatttagagctattgcccaatcgatgtcgcgctcgtcctggaatccgacaatgacctttagccttgtgtattctgcccctgccttgatgtcatcttttgacattgctctggacttcgacgcctgaccgacgatccgcgccgtcaaattcgaaagcgtaatcgccaacgcatccagaatcgaagacttgcccaccccattgacgcccaccaaagcgacagtctgcttaccctcgaaatcgagttccatcttctcgataccgcggaaattgacgagggtaaaacgcttgatctgcatgatcggcttccaacgtgcctggccgggtcagccagtcttcaaagtaagcacggatcatagtaattatcgactgatctgtcacggcgctgacggtggcagctatcatcgctgcgttgctacgcgccacacccgtgcaatatcggctgcccgttcgctgagcagacgcggcgcctcagcgcaggcctgttccaggctcatcggaccgctaggcaaggcaaatgccgcatccacgccatgggcatacatctgctcgtagccctcacccaaggtgccggcgatcacaataacgggcacgttgtgctgtcgggcgatgcgcgccacgccgaacggggttttgccgcgcagggtctgggcgtcgaaacggccttcgccggtgatcaccaggtcggcgccgcgtacggcggcgtccaggccaaccagttcggccactacctctacgccagcgcggaactgcgcgcccaggaaggccttggccgcaaagcccaagccacctgcggcgccgctgccgggttcgtcgcgcacatctttggatagcacgttggcgcaatgatcggcgaagtggccaagggcggcgtcgagttgttggacttgctcgggattcgcgcctttttgcgggccgaaaatcgccgaggcgccatgggggccgcacagcgggttgttgacgtctgcggcgatttcaaagcgtacctgcgcaaggcgtgggtcaagctgttccaggctgacccgcgccaggcgggccagggccaggccaccaggtgccagcggttggtcgtcggcgtcgaacagttgcacaccgagtgcctgcatcgcgccagcgccgccatcgttggtggcactgccgccaatcgccaggatgatgcgttcagcgccggcatccagtgcggcgcggatcagttcgccggtgccatgggtggtggtggtgcatgcgtcgcgcaggcccgacgacaccaattgcaggccgctggcctcggccatttcgatgattgcggtgtggctgtcggccaaccagccccaacgcgcctcaaccgctgtaccaagcggaccgcgcacgctgtggcggcgcaattggcccttgcacgccgccagcaccgcatccactgtaccttcaccaccgtccgccattgggcattggaccaactcggcatcgggccacacctgggtcagcccttcggcaatggcctgggcgacgccttcggcactcaggctgtccttgaacgagtcgggggcgatgatgattttcatgggctttctccggtttttatgacgcccatgctgccagttgccaccgccgctgacgccggtccgatgcacaactgcggcggtgctttgttgttcattccgacaaaggctggggcagcagctgaacgccgaggtacagggcgagcatgccgtccagggtcaacgggtcgacgccactgagctcggcaatgcgctccatgcggtagcgcaggctgttgcggtgaatacccaaggcgtcggcacaggcctggctttgcccgtcgtgttcgcaccaactgcgcaaggtggccagcagttgaccattgccgtccttggccaacactttgcgcagcgggttgagcagttcatcgagggcgtcgtcgttgcgatggcgccagagcatcaccggcaggcgatagcggttgagcgtgagcagccgtgactgcggcagcacatcgcgaccataggcgagcaaatcaccgacgcgccgatagcagcggcgcagccccgccagcccatccgcttgcccgcccacggcgacgcgcaggatgctccagccaaggccttcgagtttttccagcaggcgtgggttgtcgaccggcaccgtggccggccggcaccacaacaatgaatactgcgccgagctgacgcaccagctgtccggataacgcgaggtcagccaggcactcaaggcctctgccgattgccccgcgccgagttcgaacagatacggcgtgcgcgccatctgcggcttgagccccagttgctgggcttcgtccaccagccgcggcgagtcgccgctttctgccagcagcagagccagcaggtcatcgcaacgctggcgccgccactgttgctcggcctgctggtggcggtggctcaccagcatctcggcggtcatacgcaccagttcggcgtaggtgcgcaggccctccggctcgccagtgatgcccagcacaccgatcaggcggccgtcatgcagcagcggcaggttgatgcccggttgcacgcccttgaggtgcttggcggtctggccatcgatttccaccacgcggccattggcgagcaccagttgcgcgccttcatggcgggtgttgatacgttcgggttcgccgctgccgagaatcaggccctggctgtccatgacgttgacgttgtggggcaggatcgccatggtccgatcgacgatatcctgcgccaggtcatgatccagctcgaacatgcggctaaattccttgaaaggggtggttgttcatcggcacagcgcaaagcagggttcgctgtgcgcaagcacaaagacagcggcccgccggagggccgagactcttcaggcgatcaacgttaccctcgcatcgcgaaaaatcataataaagagagactcccatgtcacagagcgccgcagccacactggccaccgatgacgataaaaacgccatctacaagcgcattaccctgcgcctgatccccttcatcttcatctgctatctgttcaactacctcgaccgggtaaacgtcggctttgccaagttgcagatgctcgacgcgttgaaattcagcgaaaccgtgtacggcctcggtgccgggatcttctttatcggctacgtgctgtgcggcgtgccgagcaacctggcgttgaccaaattcggtccacgccgctggattgcgttgatgatgatcgtctggggcacgctgtccacctgcctgctgttcgtcaccacgccgacgcacttctacaccctgcgcctgttcaccggtgccgctgaagcgggcttcttccccggcgtggtgctgtacctctcgcagtggttcccgaccttccgccgtgggcggatcatggcgctgttcatgtcggccattccggtctccggtttgctcggcagcccgttctccggctggatcctcaaccactttgctgccggccaaggcggccttgccggctggcagtggatgttcctgctgcaaggtatcccgaccgtgatcctgggcgccctcgcctacttcctgctcagcgacagctttgcccacgccaagtggctcaagccccacgaacgcgcggtgctggaagccgaccaggcgaccgacctggccaacaagccgaaaaccaccagcgattcgctggccgaagtgttcaagaaccccgcaatctgggcgttcggtttgatctacttctgcatccagagcggcgtgtacgccatcaatttctggttgccgtcgattatcaagaacctggggttcagcgataacctggtgatcggctggctcagtgcaatcccctacttgctggcagcggtattcatgctgctggtgggtcgctccgccgacttgcgcaaggagcgccgctggcacttggtggtaccgatgttgatgggcgctattggcctggtgattgcggtgaacttcgccacgacaccggcgattgcgatcctcggcctgaccatcgcgaccatgggtgcgctgaccggcctaccgatgttctggccggtgcccaccgccatgctcagtgcgggcgcggcggcaggcggcctggcgttgatcaactccatgggccagatggccggcttcctcagcccctacatcgtgggctttgtgaaggatgccaccgggtccacggatgtggcgctgtacttactggcggcggtgattgtcgccggtagcgtattggcgttgcggatgacgcgtaccctgaaggcttaggtcgctgcggcaatcagagcagaccgccgccgtcgatatcgatcacggcgccggtcataaagccattttccatggccagcacataccccgccgccacttcctctgcttgccctactcgcccgacaggcaacgcggcgccggccttggcaaacatcgccaggcgctgctcctctgcaaggccggcatacgccggtgtatcgatcacccctgggctgaccacgttgacccggcgcggtgccaactccttcgccaactgtttacccagcgcttcggtggcggcgttgatgccggtcttgatgaactggcccggcgccaatttacgtcccagttgcccggaggtcaggctgatgctgccctgctcatccaggaatggcagtgccagttggatcgcccgcagcgagccccagagttttacgttgaagttgtcctgggcctcgctcagatcggtttcgatcaaggtcttggcacgcacggtgggccctgaggtgtagaccaggtggtcgaaccgccccacgcgttcgaacaagtgttgcaaggaccctgcgtcagtgacgtccaccggttcgctgcgcaggccgtttaccacgccgctggtcaagcgccgcccggccagtaccacctgcgccccgcgcgcagcagcggccttggccacggccgcgccaattccgctgctgccgccaatcacgatgacggttttgccgttgagggaagaagtcatggggaaattcctgattgagaaagtgagggttcatcttcccagcttggcaatcgacgaaaaatcccggtaaaacgacaagatctttaaaggatttttacaaatgagctcgaccctcgaccttgaagtcttcgtgcgcaccgccgacaccggcagcctttctgccgccgcccgcagcctcggcttgaccccggccgccgccagcattgccctcaagcgcctggaaacccgcctgggcattcgcctgctggcacgttccacccgcagcatgcgcttgaccgaagaaggtcgccgctacctggagagcgtgcgcgtcgcactggaggcgctgtccgagggcgagcaggcgatcaagcagcagggccagagcctcagtggcctgctgcaactggcggcgccctcggacttcgggcgcaatgtgctattgggctggctggatgcgttcaagctcgaacacccgaatatccgcctgcaattgctgctcaacgacaccaatgccgacctgttccgcgacaccgtggacattgccctgcgctttggcgtgccccgggactccagcctggtggcgctgccagtggtgcccgaccaccaccgcatcgcctgtgccagcccggattacctggcgcgtcacggcacgccccgggttccgagcgatttagcgcagcacaacacgctgcgctacatgcgtcagggccgcgccaacagcatctggtatttccgccagggcgcggtgttgcaggaggtcgaggtgtcgggcgattacttgagcgatgacggtgaaatcgtgcggcgctgggcgttggccggtcacggcatcgcctacaaagccaacctggatatcgcccaggacatccaggccggacggctggtgccgttgctgcctgactggcaaggcgagccgacgccgttcaacctgatgtgccctcaccgtcttcaagtatcggaacgggtgaaggtgctgcatcgttttttacaagcgcgctgcaagaccctgctgagtccatgaagaaacgcgcccagggcttgtcccagaacggccgagtctggtattgcatggggtacgttcccccgccttgaggagttatccatgatttaccgcacattgggccagtccgggttgaaggtcagcgccttgaccctgggcaccatgatgtttggcgaacagaccaacaccgaggactcgctgcgcatcatcgacaaggcctgggaccagggcatcaattttatcgacacggcagacgtctacaccggcggacgttccgaggaaatcgtcggcgaagccatcgtgcgcaatcgccaggactgggtggtggcgtccaaggtcggcatcggcccgctggacggtttgcccaaccgcagcggcttgagccgcaagcgcatattcaacgcgctggacgccagcctgacccggctagataccgattacctggacatctactacctgcaccgcgaagaccacaacacgccgctggaagtgacggtgtcagcgattggcgacctgatccgccagggcaagatccgctactggggcttgtcgaactatcgcggttggcgcattgccgaggtgattcgcgtggccgaacgcctgggtgtcgacaagccgatcatcagccagccgctgtacaacatcgtcaaccgccaggccgaagtcgagcagatcaccgcggcggccgcttacggcctgggtgtggtgccttacagcccattggcccgtggcgtgctcagtggcaaatacgcgccggacgtcactcccgaggccggcagccgtgcggcgcgccaggacaaacgcatcctggaaaccgaatggcgcgtggaatcgctgcgcatcgcccagcagatccagcaatacacccaagggcgtggcgtggggatcgtggagtttgcgattgcctgggtattgaacaattcggcggtgagctcggcgattgtcggaccgcgcaccgaggcgcaatgggatgcctaccttggggcgttggaggtgaagatcacggcggaggatgaagcgttcatcgattcgctggtgacgccggggcattcgtcgacgccggggttcaatgatgtcgggcattttgtgtcggggcgcatcgcccgcggttattgagctagaccgttcattgtggcgagcgggctaactgtggcgagcgggcttgccccgcgttggnnnnnnnnnnnnnnnnnnnnnnnnnnnnnnnnnnnnnnnnccaacgcggggcaagcccgctcgccacagttagcccgcccccgcagcggactaacgcgaaattttgctgaaaaatgccccaaaacagcgcaaccctctcgcggtaaaagcaccataatcccctgttcaaatccccctcttttcgtatcaatggtttttcgcgaggacagcgtgtctaaaggtgtcgtgttatcggtcttggcctcggtgttgtttgccgtgatgtattacttcacgtcgctgctcacacccttgagcggactggaaattttcggctggcgcatgttgctcaccgtgccgtgcatgacggtgttcatgatggtcagtggcgaatggcgacgagtgtgggaactgctgcggatgctggctgccaggcccgcattgattggtggtgtgctggtgtcttccgccctgctgggcgtgcagctgtggctgttcatgtgggcaccgctgaatgggcgtagcctggatgtatcggtgggttacttcctgttgccgctgaccatggtcctgaccggccgcctggtatggggcgaacagttgtcgtacttgcaacagatcgctgtcttttttgcaggcctgggggtgctcaacgagttgtaccaggctggtgggttttcctgggccacgctggtggtgatcatcggctacccggtctatttcatcgtgcgcaagtacctcaagaccgaccatttgggtgggctctggctggacatggcgttgatgctgccggtggcctggtggtttgtgcaaagcggcgagcaaggctttgcggtgctggatgcgcaccccaagctgtacgcgctgattccgatgctgggcctgatcagcgcctcggcgctggtgagctacatcattgccagccgcttgctggcgttcagcctgttcggcttgctcagctacgttgagccggtgctcttgctgggcgtggcgttgatcctgggtgaagggatcaagggcggcgaatggttgacctatatcccgatctggctggcggtgatggtgctggtattcgagggcttcaaacacctggtacgccagcgtaaagcctgatcggcaggcagcaaaaagcccggccaggttaccctcggccgggcttttttgtgtgcgtcagtcggtggtcaatacaccacgacgcacctggtcgcgttcgatcgactcgaacagcgccttgaagttgccctcaccaaacccatcatcgcccttgcgctggatgaattcgaagaacaccggccccatcaaggtttccgagaagatctgcagcagcaggcgcttgtcgccttcaaccgaggaaccgtccagcagaatgccgcgtgcctgcagctgatccaccggctcgccgtggttcggcaagcggccttcgagcatttcgtagtaggtgtccggcggcgcggtcatgaagcgcatgccaatcttcttcagcgcgtcccaggtcttgaccaggtcgtcggtgaggaacgccacgtgctggatgccctcgccgttgaactgcatcaggaactcttcgatctgcccggcgcccttggacgactcttcgttcagcgggatgcggatcatgccatccggcgcgctcatggccttggacgtcaggccggtgtactcgcccttgatatcgaagtaacgcgcttcacggaagttgaacagcttctcgtagaagttcgcccaatagaccatgcgaccgcgatagacgttgtgggtcaggtggtcgatgaccttcaggccggcgcccaccgggttgcgctccactccgtcgaggtagacgaagtcgatatcgtaaatcgaactgccttcgccgaaacggtcgatcaggtacagcggcgcgccgccgatgcccttgatggctggcaggttcagttccatcgggccggtttcgatatggatcggctgggcgcccagttccagggcgcggttgtaggctttttgcgagtccttgacgcggaacgccatgccgcacaccgacggaccatgttcggccgcgaagtaggaggcaatgctgttgggttcgttgttgaggatcaggttgatctcgccctggcggtacaggtgcacgttcttggaacggtgggtcgcaaccttggtgaagcccatgatctcgaagatcggctccagggtacccggcgtcggcgacgcgaattcgatgaactcaaagcccatcagacccattgggttttcgtatagatctgccatgatttggcgcctcatcattcttgtgttttgaaggtttcaattgccagcaaggatgaggagcacgggcggcgcacaggaaaggcctcgcacactgcgggcgaggaagtcaccaaagatgaggggggagccgagtagcttcatggtgtcatcggtctctgacggcttaggcttgcgtgagcgcaagtccatattcttgtatgcgtaaatcgattctacacagcgtaaccaggtttgtccgtactcttatcaaatccccattacccgtacccgtgcaaggggtttattgcacaggtagatgcccgccaggatcacggccccgcccagcagcatcggctgggtgaaaggctcgtccagcagcaaggcgccgcagatcaccgccgtcagcggattgagcgcgatgaatacaccactgcgggtcgcgccaatacgccggatgccatcgtaatagccgatatacgccagggccgagcccagtacaccgaggtaaagcaggctgtacaactgcggcaggtggatagcagtgagcgcatccagcgtcagccgtccgctcagcaacgtggtggccgcgagcatcagcgttcccagccacaccgaccaggtgacggtctgcaaggggcccaggctctggttcagcgtgcgtgagcccaatgaatagatgccccaccccgccacacagccggcgatcaacagatcgccgcgccaggcgtcggtcgcgccctgcagccccagtgggtcgcggttgacaatgacaaccgccgcgcccgccaggcacaacgcgattcccagcgccttgccaggccccaggcgctccttgaataacaggcaggatgccaggccaatcaccgctgggttcaaggcgacgatcagcgacgcccgcgacgcgccgatgtactgcaagccatagaaaaagcacaggttgtagaaaaagatgccgaagaatcccagcaatgccagtcgccccaactgcggcaggtttggacgggccaggggaatgcgcgcgaacgccatgaacagcaacagcgcgacgctggccagcacaaaacgcaggctggccgccagcagcgggtcgacggcaccggacaaagaacgcccggcgacgaaggtgccgccccagatcatggagacggcagcgagcttcaggtaggtcaaacaatcggttgaaggtttcatcggggtattgctctggcgttggacgggttagcctagtgtttgcccaatacctgatcatcgtaaaatgagtaaacactcatgaccctgacccaactggaaattttctccctggtcgctgagctgcaaggctttacccatgccgccaaccgcctgggtatcagccaatcggcggtgtcccatgccatcaagggtctggagcaggaactgggggtggagttgttccgtcggcatcaagcccatgtggcgttgaccgacatcggcgaacaattgctgttgcgcgcccgcgccatgctcggcctggccaacaccctggagcaggaggccgccgatgcccggggcttgaagcgcggcacgctgcgtatcggctccttcgggccaacgtcgtccaatcggctgttgccgcagatcctgcaaccgtttcgccaggcctaccctgacattgaggtgcatgtcgatgaaggcccggaccgccaggtcatccaatggctggatgagcggcgcatcgacgtgggcttcgtggtgctggagcaggagcggttcgacaccttcgcgttgttcaccgatcagatggttgcgctgttgccggccaaccatcccctggccgaacaccctgccctgcgccttgaagacctgtgcgagacgaccttcatcctgaccgaggccggctcgtcggagctggtctcacgcctgttcgccagcgcccggctgacgccgaaggtgcgttatcgttgcgcgcaactgctcagcacgctggaagcggtaagccgtggcgatggcctcagcgtggtggcccagggttccctgccggttacgccagatccgcgttatgtggcgcgcccactggcaccggccattacccgttcgatcggcctggcagtactggatcgccgccaggcgtcccctgcgaccctggcgttcatacgcgtggcgcagggcctggactatgggcatgtctcaccgctatagcgactggcgatgatggcgcagcgcgccgttgtcatccacggtactgaatcgcaggctggccgcaccggatggcgccttcaggaccgtgtcgaaggacaggtgagtggcggaccgtggggcaaccatgggtgggttgtgatgggggtattcgacgccttcgacaaccagtaccaccgacgccagcgtcacgtgaaacgcgctggggttgcgcactagcacaactgttcgctgcccgccgaccaggcgccaggccaatccgctcgcagcatccactgcgccgttggcaagcgccaccggtcgcaggaacagtttgatccgcgtccgaatcgcccattgcaaggtattgccgcccgtggcgtcggtggcagagggtcgaacactcagcacgttgagccagtacagggcttcctggtcggcaaccggcacaggagcttcgcttggctggtagacaatacgcaacgctgcacctttgcccgcgtcaatgcgtttgatcggcggcgtgagggtgaagggcacatcgctgtattccggtggcaactgcgcgtcacccttatcgatccaagcctggaccagcctcgggctgtcggcttgattggtcagttgcaggctcacttcacggctacccatggggtagatgatgcgtgtacggtccaacaccacgtcaccactggcgatggtagcccacaacgtgccgaaacacgccgccgtccagcagagcaagcccgtactcatcgataactcagggtgaacgtcgcctgcccattggccgttccggcctggatgcgtgcggccgtttgcacgtagcgtgccgtgagtggaatggtaaaggtgccattatcggtggtgcccgccagccactggttgggcgtgccgattgcgctggagtcggggccgtagctcagcagccggtcctggtgcagcaactgcagggccacgccccgagcattcgaatcgctggtaagagacaggcgattgctacggttggctggcgcggtctggtcggtcagggtcaccagcacatcgaggctggcaccggtaccgccggcacattgcaacacgatggtctcggtgacggcccctgcggtgctgccgatgccactgaaatcacgcgccgacaccgtccccaggcgcattgccaggctgggtgtcgagacggaacacgtcggtttgcgcggcggcccgatcaacgtgctgcccagggtgatcatgtgctcgcccgtcgccgagcgcacggcgaagcgggcgatcgggcgggagccgataatgccgccctggatcgtgccggtgacgaagaaaaacaaccgcccccgcaagccccagctcggtattccggggtatatgggcggatgcaaggcgctgataccggtactgaccgcctggggtgatctgttgtcacggtcttcggcaatcatacccatcccgacccccgcgacaccggtccggtaaatcggcatccgcaccccataatgaaagtaaaagctccctgtgaagttcaggtcactgctcagggatatgtagctccagtactcactgaacacatcgtcgtatcggcaaaccatcgcattgggaacgtcgaacgtataaccatccgggttacccagtacttgtccggggctcgggttaacgggcagcgggtcgatggcgggcacgttgatcagagtcggggcggcggcatcgcagtcgccacccgcccgggccacgggcagtgtcagtgccgttaacagcagcgccaggacacaggcggcaaggcgcttcatgggatggccacgcatcgaccttcccacacctgcgcgctgcgctggcgctcggcggaaggtctggacggcaattggtagacaatgacgcaacgtccatccgccgcagcgctccaacgcacagtcagccggccgctgtcgctgatacccctgacaaatgccttgctcgcctgccccactaccccgacttcgcgcccttgttcatcgaacacctgcgcggcaaacggcaagggcttgccgttgtcccggcgcgccttgacgatcacggcgcgaccgctggcgaccttgaagcgcaacagcgtcaatgcgcccagggtgggcacgacactttggctggactccagcagctcgacgtccacgggcatgccattgggatcaagcgtcaccacattgcgccggaatgcttgcaggttgggcgccaccgcataaccatccgcgccgatacgcgcgtggccgttgttgagtgctgccccctgcgcgtttggggcgtgtaccagggcggcggattcgcccaggctctgggacaggatcaatccgtcgggatgagcgaccagcgcgccatctgcgctgaatgccagttgcgcaccctggttggattggccataacccaggcgcatcgccactgcctcaccgcgatagccggtgtaagcattcactgcgctggcccgtgaacctgctgctgcgctacggttggcccaaacgccataatgagcgctggcatcctcccccagcagaccattgagacccagttgctgttggctaccgcgccggtcgccacggtcccaatgctgggtgctggtcaatgtgggggcgcgcagtcccgcacccaccggcatcgacaaggtcagggtgatgcggttatccagccgcccgcgctggccaacatcaccaaagaagagcgcgtcgctgtgttccctcgggctgcgccgctgctcgtcgcgcaggcgagtgtcttcgacacgtgaacgctgcatcgagacattccagcccaggcgtttccaggtagccccgtagctcactgaaaaggtggtctggcgcccctgctgccgccgccaataggcggtggaactgccggacagagttaacgttccgccgcccaattgctggctgacattcagatcgatgcggcttttctgcctggccaatcgctccgcgccatagccttttctcaggccttcctgtgcgctcaaggcatcgtacaaactgaaataccccggcgtggagtaacggtacatgcccagtgcgaagtgagtaccggaggtcggcacgcttttgtaataacccaggcccaggctgtgccccgagcggttgccctgcccgtccagccgtgtgcgggagccggtggcatccagggaccatacgcccaacgcagtgcttgccgcgacgcccaatttgccctggtgatagccctgggtgccggtgccgccaccgtacaccgtcaacccgtccgccacaccgtgggcaagcgtgccctgcaccatcgctggcatgcctgcggacacgccgagctggttcacctggcccaggctcacctgatagtggcgagccccgctgcgcaataacagcggtgttgcggagtacggcaccgtgaacgtgttccgccgcccatccacctcggtcacgctgacggtcaagtcaccgccatacccggtggctggcaggtcattgatctcgaacggacctggcgccaccgtcgtctcgtagagcgtgtagccattctggcgaatggtcacggtggcattgccttctgccacgccacgcaccaggggcgcataaccttgacgggacggggccagcatccgctcatcgctggccagggtcacgccccgtacgcgtacgccttccaggatctgcccgctgctgaaactgtcgccgactcgcaactgcgcctgccataccgggaggctgcgttgcgcaaaggtcgaggtgttttgatagggcggctggccggtcgccgaatcccaggtctgcgcgccttggtgccgcaggcgccagcggccgaggttgaggcccgcattcaggcccagataagcacggtcggtgcccgcgcccgccgtcatgcgggtagtgctgaaggtgtaattgagcaggccggcgttgatgccttcatcccagtaagacgggtcgataaagccacgggggagttgtctgacgtacacctggggcaggctcaccgtccactccagcgcggcggcgtctacacggcttgtcgccgcaggcagccaatccgccagcgcgggacactcggaagccgtgcgcagcgtgccgatgcgctccggtgcgacaccaagttgcagcagcaagtcatggtcgacacagggcacagcatcggcttgtgcgtcagtggtcatgaacgttacttcacggcggcccatgggctggccgttgacaatgatctccataagatgagtgccagggctcatcaggtcgtagcgactgaaccgagacacatcgacggccgcgccctcgctggaaaaggcttgcaggtcaaacaccggctccgcggctgtcgcatgttcaatcgacgtcaatgctgcactgatcagcccggcaagcatcgactgcctgttcacggtcaaagcctcagcgcagcacgctgcggcggtgagaacgcgccatagtcgttgatgtactggaaatgcacctgggcatcggccggaatgtgcggggcggcttcgtggaccgccaggcgcaaggtatcgcccggcgcaaccatcccggtgtcgctgcgcaagaggcgagcatcggcccgtggccccaaggccagcgcaacctcttggaacgtgacatgaaaggccgacgggttatgcacctccagcccctgtcccgtcgccgtcttgtagagcgaccaacgtaattgccccggagcgtcatcgggctttcccggcagctggtcaggacggaagaacactttggtgcggatgcggaacgcaaaccgcagttgattgccttgctcgtcgtccagcggagccgatgagtgaaaccttggcggtacctccagcacattgagccagaacagtgtttcgcggtctttgggcaatagctctcgggaatacaccaggcgcatggcgtggcccttgcccgcgtcgatacggaacaccggcggcgaaaggctgaacggcacgttgctgtcttccggaccgacccgccgatcaccgggttcgacccacgcttggaccaggcgcggtgctgcggcgtcttcgttggtcaattggatggtgatctcagcctggcgctcagggtagatatggcgcgttccgttgataatcacgccggcatcgaccgtcaccggtgcgccgggcaacagtgcggccagcagaaatcccaggcagcgccgggcctttgtcaaacaccccatggctgcgcactcctgttcccggctcgctcagggaaaggtcacggagtactgcaccgccgcctggactggcccattaccggccgcgccagtagcgatgtaccgcgccgcaaatggcaacgttgcaatgccatcgtccggaattgcgggggtggatgtcgtccccagccgcaggtcgatgggccggttcacggccccatcgatgatttgcacctccacattcgccgcgccggaggcggccgtgttgagcagattccccgtcagcgggttgaccccggggctggtgctctcgaacaacaccgccaccgaagacgccgcacaaggggatgccgtaccgcccacgtagatgaaaaagggcttgctgccggccgtatcaccggccgccttcaacgcggaggcctgcactttgtccagcgctaccggaaagctcgccccggtgcccggccctgatccggtccccccggtaatcggacacgtgctgccaacaatatcgccactgagggtgatgatgccgtctgctgccatgacaggcccgacgatgatacccatgaatgtgagaaacgccgctgcccgccttttgcttttcatgatgcgtccaccttagaaaaaccgacgttttgatcataagtaacgtgcgcaaggctgcctactgaccgaacggctaggtatcccgagcttattgcggcgactgcaactatcatcgagacaagtccgacctgccgtgctgacacctctctcatctcgcaacaggcttacatcccatgcccctgaccgtccaaggcccccgcagccgtgccacccgcaacctgatcagcgtgttctgcgccatggtgccgcttgcattgggcgtggtgatcctccattggcaagccgaacgtacccttgaacaaagcacggcccagaccgcacaggaagccgtacgccaattcgacttgatgctcgataacaccgcgctcgccgcccaggcattgctgccgttggcaggacagccgtgtgataacgccgcacagctggccttgcgtgaacaggtcacacgccgcccgttcgtgcgggcaaccaccttgtcctggcagagaaacatctattgcagctcgctgtttggcgaccaatacgcgtcaccggtcaacccggatgattacgtggacggcaagttatggctaatgaatggcaacccggtgacgccggataccgcactgctggtgtaccggctggtcgagcgcgacaaggccgcttttgcgtcgatcgacggctaccacctgaccaacgccctgcggctgatcagcccctacgccgacctggtgctgcaagtggggacccattggctgggggccgatggaaaagtgcatgacacagcggttccggtatttgccgtggcccaccatcatcttgcatccgcgcgttatcactacagcgtcgacgcgggcatgccggctggcgaagtctggcgctacatgcaggcacgatacccggcattgttcagcctgctggtgttttttggcgtggcggcgggagtgcttgcgcattggctgcaaaagcgttcttcggcccctacccatgaactgcgacgggccttgggcgccaacgaattcattccgtacttccagcccgtggtgcgcggcgatacccgtgaatgggcaggctgcgaagtactgatgcgctggcaacaccccaaggaagggctggtgcgacccgatctgtttatccccctcgccgagcattcgggcctgatcgtgccgatgactcgtgccctcctgcgccagaccgccgcgcaactggcgcctcatgccacgcgtttcagcccgggattccatattggtgtgaatatcaccgcacgccactgccaggacctggcactggtggaggactgccgcgagtttctcgccgcctttcccgtgggccaggtgaccctggtgctggagttgaccgagcgcgagctgatcgaacccaccgacattacccgccgcttgttcgacgcgttgcatcaattgggagtgatgattgccattgatgatttcggcaccggtcattccagcctcgggtatttacgcaacttcaatgtggactacttgaagatcgaccagagttttgtcgccatgatcggtgcagatgcactatcggggcatattctggacagcatcatagcgctgtcgggcaagctcgacttgggcatcgttgcagaaggtgtggaaacgcgcgaacagtgtgaatatctggccgctcaaggggtggacttcctgcaaggttacctgtttggaaaacctttaccctgtgatgaatttattaaatcgctggcgcgtcattgaatagccatgcactacctgcactgaaatagttgggtctagagaaaagacatgatttactcgtgacgcattaactactacaatttttcctgcctgtgcagaactcgcgggatgacttctttcctgggtcgccttaaagcgcttggcttatagctttgtctgcagttgatatcagccaactacactattggagtacagattttgtccagactcgccgaatttcgcgcagcagaaaaagcccttcaagagcagcttgcccagctggaatccctgaagaacgatgctggcctgaagaaagaaatcgaattcgaagaaaagcttcaagccctgatgaagagctatggcaaaggcctgcgcgacatcatttccatccttgatccaaacccgggcaagtccagcgcagttgctgccgcacctaaacagcgccgtgcgcgtgtggtcaaggtttaccagaacccgcacaccggtgaactgatcgaaaccaaaggcggtaaccaccgtggcctcaaggcctggaaagaacagtacggcgctgccactgtagattcctggcttcgcggctgatcgtactgcacttataaagagccccgctgacgcggggcttttttattttatgggttcgaaatcgaacttaaataacatttcactttgttcaaaaacgacaggcctcacgcacttaaagtttcaggctgtcgcgcaccgaactgacttcttccttgcttgcttcgtacgcctcggcctgacctgcgtatgaaaaaacatacgccttatcggtatcaaccgcgcccaccaatgtttgcgagagcacgtgccgcccgttctcggttatcacgcaagtagtttccaacgcttcaagacggctcaatgttgtagggtgcatcttgctgcacacgctttgataaccaccctgggcgaaatccttctggatggatttgcgcatctccagcagtacgccttgaagattaaccttatgaccaacttcaatcggcgtcccggtcaactccatgaccatcagggtcgtaccgttttcatcattcttgattgcccgctgccgcgacactgccaggggcttggcaggcgcctggtcatccgccatcgcttcttcaacctgccacccgctaggccaatgaatttcgggctcagcggctactacgcaggaactgcccaaccacaagcacagcatgctcaacaacggtttacgaaattcggtcattacgaaaaacacccaaggtccaaggaccaaagtttgagccccggcacccacaggccgcaaggcctgcgtggctttttcatctggcgaccgggccgagccttgcgtatcatggcccggctgcacggatgccagccgcaagccaaggaaccgctcacatttcagagccgcgtttgccccattttttctggagggcccatgagcctgcacgaactgaacaccttcccgggcgtcactgcccaacctgataccgccaccgccaacttcgtgttcaaccacaccatgctgcgggtcaaggacattaccaagtcgctggacttctacacccgcgtcctgggcttttccctggttgaaaaacgcgacttcccggaagccgagttcagcctgtacttcctcgccctggtcgataaatcccagatcccggccgatgctgccgagcgcacccagtggatgaagtcgattccaggcatcctggaactgacccacaaccacggcaccgaaaacgacgccgacttcgcctatcacaacggcaataccgatccgcgtggtttcggccatatctgcatctcggtgccggatatcgtcgccgcctgcgagcgcttcgaagccctgggctgcgatttccagaagcgcctgagcgatggccgcatgaagagcctggcgttcatcaaggacccggatgcgtactgggtcgaaattatccagcccgcgccgctgtaacgaaaaaaccccatgatcactcatggggtttttcatttgccgggcctggcttacgccggggcagaagtccggatcaggtggtcgaacgcactcagggaagccttggcaccctcgcccaccgcaatcacgatctgcttgtagggcacagtcgtgacgtcaccggcagcaaatacacccggcagtgacgtctcgccacgcgcatcgacgatgatctcgccacgcggtgtcaattccacggtgcctttgagccagtcggtgttgggcagcagaccgatctggacaaagataccttccaggtcgatggtcttgaactcaccactgtcgcggtccttgtacgccaggccggtgactttctggccatcgcctttgacttcgctggtcagcgcgctggtgatcacgtcgacgttcggcaggctgtagagcttgcgctgcaacacagcgtcggcgcgcaacttgctgtcgaactcgagcaaagttacgtggctgacgataccagccaggtcgatcgcggcttccacgccggagttgccaccgccgatcaccgccacacgcttacccttgaacaacggaccgtcacagtgcgggcagaagcacacgcccttggccttgtattcctgctcgcccggcacacccatttctctccagcgagcgccggtcgccaggatcacggtcttggacttgagggtcgcaccgctttcgaagcgaatttcgtgcaggtcaccggcgtttttcgccgggatcaaggcactggcgcgctgcaggttcatgatgtccacatcgtactgacgcacgtgagcttccagggcgctggccagtttcggcccctcggtttcctgtaccgagataaagttctcgatagacatggtgtccagcacttgcccgccgaaacgctcggcggcgacgccggtgcgaatacctttgcgtgccgcgtagatcgcagccgacgaaccggctgggccgccgccgacgacgagcacatcgaaggcgtctttggcgctgattttctcggcggctttttcgatgccgctggtgtcgagcttggcaagaatctcttccaggcccatgcggccctgaccgaagttcacaccattgaggtacacgctgggcaccgccataacctggcgctcgtcaacctcagcctgaaacagtgcaccgtcgatggcgacgtggcggatgttcgggttgagcacggccatcagattcaacgcctggaccacatccgggcagttctggcaggacagcgagaagtaagtctcgaagctgaactcgcctttgagggcgcggatctgttcaatcacttcgacactggccttcgacgggtggccaccgacttgcagcagggccagcaccagcgaagtgaattcatggcccatggggatgccggcgaaacgcaggctgatatcggcacccgggcggttgatggagaacgaaggcttgcgcgcatcgttgccatcggtcttcagggtaatcagcgtcgtaaggctgaccacgtcctgcaaaagggcaagcatttcctgggatttcgcgccgtcgtcgagggaggcgacgatctcgatcggctgggtgacccgttccaggtatgacttcaactgagctttaagattggcgtccaacatacgggcgatttcctgttcattcggtttattgcagacaaaaaaacgcccgagcgaacctcgcccgggcgttctgagggcggatgcagcttacttaagtgcggattcccgcccttgagacttcacagacttagatcttgccgaccaggtccagggacggagccagggtggcctcgccttctttccacttggctgggcacacttcgcctgggtgggcagcaacgtactgagcggccttgattttgcgcagcagctcggaagcatcacggccaacgccaccgtcgttcagttcaacgatcttgatctgaccttccgggttgatcacgaacgtaccgcggtctgccagaccagcttcttcgatcagtacgtcgaagttgcgggagatggtcagggttgggtcgccgatcatggtgtactggatcttgccaatggctggcgaagtgttgtgccaggcagcgtgggcaaagtgggtgtcggtggaaacgctgtagatttcgacgcccagtttctggaattcggcgtagttgtcagccagatcttccagctcggttgggcaaacgaaggtgaagtcggctgggtagaagaacacaacagaccacttgcctttcaggtcagcgtcggacacatctacgaagttgccgtttttgtaggcggtagctttgaacggttttacttggctgttgatgataggcatcgttgactctccgtcaggtttgtagaagggcttagtaagttgatgaggtgaatcctacccactctctacgccgatggctcattggcaaacctgatgctgacgattggttttccctatcaggtgactgtattaatagaagaaatctcaaagcagcggctggctcgccaggctcatgccgagaaagggcgtcgcttcaacatagcgcatggcggatttcatgtcgctccagccgacgtaactcatcaacgacttcaaatcccagccgctgcgatgagcccaggtggcaaagccccggcgcagcgagtggctggtgtagtgctcggcgggaatgccggcacgctccagcgcctggcgcagcagcgggatcacactgttggggtgcaagccctcctcccccaggttgccccagcgatcaatcccgcgaaacaccgggccacgtaccaaagccgaggcactgagccactcgctataggcctgcaccgggcacaggcgcaacagtgccggagtgtgataggtcttgccgagattgtcgcggtcgcttttgctgcggggtaggtacaggctgatccctgcaccgggcatcgcttgcacatgctcgatagagagacgacacaactcgtcgctgcgaaagccacgccagaatcccagcaggatcaatgcggtatcacgcttggcacgcagcaatcggggctggttctgtgtttgcgccgcttctatcgcttcagcgtcaagagaagcaaccacttgctccagatgcttgagctgcaacggttcggcttgcttctcccgcaccgggtgcactgcacgaatgcccttgagcaccttgcgcaccacggacgccttggttgggtcaggaaacccctggctcgtatgccattgcgccagtgccgagagtcgcgacttcagcgtgttgaccgccagcacaccggcatgggcgaccagatagcgcgccacgctgtcgctggtcgccggcaggaacccgccccagctcacttcgaaatgctcgatcgctgcgcgatagctacgccgcgtgttgtcgcgggtggcagcgttgagataacgatccagatcgctcatgggaggcctattcgtactgttgactgacgcattagcggattaaaccgtaatgacacgggataatacgccaatatcccatctgttaaatgatgaatttaaacaagttttatacgtgatatagtatgtatatacataccacgtaccacattacgaaatcgacggagaccccatggctcgcggcggcatcaacaaagcagtagttcaaacggcccgcttggcaatcctcgcccgcggcgagaaccccagcatcgacgcagtgcgtatcgagatgggcaataccggctcgaaaaccaccattcatcgttatttgaaagagctggatgaaagcgaaacccgcaccaccatcaccgaagcgccaatcgacgacgagcttggcgaactggtggcgcgactggcccagcgcctgaaagagaaagcccaggaaccaatcgacctggccctggcgcagttcgaacagcagaaggccgccctgctcgccgaggtgcgagcccttgaggaggcccatggccaactccagcagcagttcgatatccaggccgccgccctggcagaagaaagcgccgccctgcaaaccgccagcaccagcctgcagaccgagcaaacccgcaacgccgggctgagccaggcgtgcagtgactacgagctaaggatcaacgacaaggacgagcagattcgttcattggaagaaaagcacctgcatgcccgggacgcgctggagcattaccgcaatgccatcaaggagcagcgcgaacaggaacagcgccgccatgaaggccagttgcaacaggtacaggcagaactgcgccaggcccaacagagcgccatggtgcgccaggatgaaatcacccaactgcatcgcgacaatgagcggctgttgatcgagcatcgggtgacagcgaaggaattgaccgcactgcaggagcaatcccgcaaagatcaggcccagcagctcaaactgacggaacaggtgagcctgattgacagcgaacgcaccctgcttcaggagcgcctgcgggtagcggcgctggagagccagtcacgccaggaagcactggacgagcaccagcgcaccaataaaacgcttgagctggcgctgatcaaggctcaggccagtgtcgaggcgttgcgcctggctgccgccgttgcagcggcgccagaggcaacgcccaaggcctgatcaacccgctacgggcgtgcgcatggtgacgaactcttccgccgccgtcgggtgcacgccaatggtttcatcgaaatgctgcttggtcgcgcccgccttgagcgcgatcgccaggccctgcacgatttcccccgcatccgggccgaccatgtggcaacccagcactttgtcggtgtcggcgtcgaccaccagcttcatcagggtcttttcctggcactcggtcagggtcagcttcatcggccggaaacggctttcgaagacctgcaccttgtgacccttctctttcgcctcttcttcggagagccccacggtgccaatgttcggcagactgaacaccgccgtcgggatcatcttgtaatccaccgggcgatactgctcaggcttgaacaggcgacgcgccacggccatgccttcggccagggcaaccggcgtcaactgcacacgaccgatcacatcgccgatggccaggatcgaggactcggcggtctggtacaggtcatccacctcaacgaagccacgcttgtcgagtttgacgccggtattctccagccccaggttatccagcatcggacgccgccccgtggcgtagaacacgcaatcagcttccagcacccggccgtctttcagggtggccttgaggctgccatcggcctgtttgtcaatgcgctcgatgtcggcattgaattgcaggtccaggccgcgcttggtcagttcttccttcaagtgcgtgcgtaccgaaccgtcgaagccgcgcaggaacaagtcgccgcgatacagcaacgaggtctgggcacccaggccgtggaaaataccggcaaactcaacggcaatgtaaccgccgccgaccaccagaacacgcttgggcaattccttgaggaaaaacgcttcattggagccaatggcatgttcgcgccccggaatctccggaatctgcggccaaccacctgttgcaatcaggatgtgcctggcggtaaagcgctggccattgatttcgacctgatgcgggtccaccaggcgcgcatgcccttcatgcagggtcacgccgctgttgaccagcaggttgcgataaatgccattgaggcgattgatctcgcggtccttgttggcgatcaaagtggcccaatcaaaattcgcctcgcccaacgaccagccaaaaccgccggcctgctcaaaatcctcggcaaaatgtgcgccgtacaccaacagttttttcggcacgcagccgacgttgacacaggtgcctcccaggtagcggctttccgccacggccaccttggcaccaaagcctgcggcaaaacgtgccgcacgcacaccgccggaaccggcgccaattacatacaggtcaaaatcgtaggccatttcactctcctcggcaggacatcagcataccgacttagatggggctgaaaaacgaaaaagccacccgaaggtggcttttttggaacaggctgcctacagcgtgaatcagtaagccttgccagtcttgtagaagtgctcgtagcagaagttagtcgcctcgatgtaaccctcggcaccaccgcagtcgaaacgacggcctttgaacttgtaggcaatcacgcagccgtctttggcttgcttcaacagggcgtcggtgatctggatctcgccacccttgcctggctcggtttcctcgatcaacttgaagatgtccggagtcagaatgtaacgaccgatgatcgccaggttcgacggagcatcttccggcgccggcttctcgaccatgtcacgtacgcggatcaggccatcaccgatgtcgtcgccggcaatcacgccatacttgttggtttcctgagggtcgacctcctggaccgcaacgatggtgcaacgatacttctggtacagcttgaccatctgggtcagtacgccgtcgccttccaggttcacgcacaggtcatccgccaggaccacggcgaacggttcgtcaccgatcagcgggcggccggtcaggatcgcatggccgaggcctttcatctgggtctggcgggtgtaggagaacgagcactcgtccagcagtttgcggatgccgaccaggtatttttccttgtcggtgcccttgatctggttttccagctcgtagctgatgtcgaagtggtcttccagcgcgcgcttaccacggccggtcacgatggagatttcgttcaggccggcatccagtgcctcttcgacgccgtactgaatcagtggcttgttcaccaccggcagcatctctttgggcatggccttggtcgctggcaagaagcgagtgccgtaaccggctgctgggaacaagcatttcttgatcatatgggtccttacaaagggctgtgcgtacggaattcggcgcagtctaatcaggccgcagtcaccttacaatgggtcctgctggcgttgcgatgtcatcatagagaaaaaatgtcggcgtaagttccgcgcatcttacgaagcgcatctgcaccggcacggccaaaaaagcctgcacctcagtatttccaagggctacgacctttttagcatgcttttacggctgcaacactgacctagaataacttgcgcgtgcccgcgacatttggcgctatcattaggcccttgaaccagaccacgagatacttgatagatgtcagaaccaaaaggcgtgaacggctacctgatcaccaagcgagcggacggttggcacctgatcaacttccacggcgacagcgtcgccggcgcattcgccagcgaaagccaggctatcgctgtagccgaagtgtttgtcgatgaagcaggccacgcttcgagcaagcggcccaagggcaagtaaacgtcaacgccctgtgcaaaaggccccgctgaatggggcttttttgtgtttgtctgtacgtagatggcagttcgctataatctcgccagaacgccccacgacagtgtcagcgcgccctccaacaccctcgatgatgaacctacatgaacaagattctggcactgactgcagcactggcgctcgccggatgcaccaccacctctgatgtctacctgaaaaacggtgagcaaggcctgaccatcgactgctcgggcgaagccaactcctgggcgagttgctatgagaaggctgatgcctcttgcgcaggcactggctaccgtatcgtcggcaccgaaggcacaccttcgctcaaggaaagtgaaaagaccctgggccaggacgtcggcaacttcaaaagccgcagtgtcgtggtggtgtgcaagtaagcgtcgcggctacagctggatatcggcgaacttgatacccaggccacgaatggtctccaccaagtcatccagccgtgggaacgactcgacttcatcctgatcgtccaccaggaaaaagctgcggccgccgcttttcttgaagaatacgatccactcccccaagtcggccggattctgaatgatatgagtggccgatatctggccttcggcctggcgagccctgacgtgttcacgcttcataaaagacttcccgaaaaaacaaatgccgcacaaaccgagggtttgcgcggcatttttgcattgaatggctgagagtttaacggatgccctgcccaatcagcacgccttctacggtttggccgtagagattgatgccgtcattggcgtggaatttaacccgggtcttctccaccgaaccgtcaactagccgcgggtcctgcggtcgttcgtggctgttgacgtaggccgcaacgtcccacgcttgctggtcgctcaggctgccgcccttgcccaatggcatgttgtgcttgatgaaggacgccgccgtattgatgcggtgcatgccggccccccaattgtaagaatccttaccccacaacggtggcatcacgtagctgtcaccgaccttctggccctgaccttcgacgccatggcagaccgcgcattgccctttgtacacctcggcgccttgggcgatgtcgtaacccttggccggctgtgccacgtcgggataaccccggcccggcaattcaacgcctaacggcgccttgctggccagccagtaggcatacaccgaaagcgcagtaatttccgggctgtcagcagccggcggcgtaccgccattcatgctgaattggaaacacccctgcaatcgctcggcaaaggtattgaccttgtcgttcttctttcggtacgccgggtacatagggtaagccgcccataacggcgccgaattggccaggcgcccctggtccaggtggcaattgctgcaattgagcccgttgccgacaaatttcggcgctaggcgccgggtatccacgaacagcgcatagccatccttgaccagcttgccgtaggcgttgtcgggcagctcactttcctgaggtggctggaattgactgaccggtgcgtggccggcgacaggttgcaactgcgattggtcttccatagcaatcgtcgccgcctgggctgacgatatgcccaacaggcccaaggccaatatcagcgggctcatggcttggcctccaacttcaacgctgcgaaatactgggcgacaccctgcacttcttccgaggtcagggctttggcgatatgccccatcaagtcattcggatcattgtgacgggttccgttttgccaagccgtcaactgggccgccaagtaagcggcaggctgaccggccaacggtggaaacgcatcgccgacacccgtaccggccgggccgtgacaactggcacacgctggaatctggcgctcccacgccccctgctgcgcaagtttttgcgcagcgccgacaggcatctcgctgcgatgaaccatttgcgggaccgcgccaggcatcgccgccagcgcctgactgaccgcgtcgatttcagcgtcggtgagcgcagtcgccaagggttgcatcaccgggttggcgcgactgccgtgcttgaagtcttccagctgtttacgcaggtagagtgcaggcaagcccgccaaccggggaaaacccgctgcggccagccctgcgccatcggcaccgtggcaggcgacgcagggcatggcgccgggctgcgaaccgccttcggtgaagatcttcttcccatccaacgcgcaggcattgcccagtagcaacatcagcgcactgcccaccagtactcgttccagagacatcatcacgactccatttttatagttatatgcttaggcgtttatggcataagcctacaaatggtaggggaatgagcccctcgcgacaactcccaaaacgcgccatcaaaaaaagcccggtcccacaatggcggggccaggctttttgatcggattcgaagtggctgggtgaaacggcgcttatgagccggaaatgcactcttcgccggccttcttcacatcaccgggacggatcggcacattggacatgctctcgtagagcttgatactgctaccactggaacggtcttcgatctcgaaaatcgccgacgggtcagccgagaatttctgcggcacgatcacctgcacaccgtccttatggggctcgatctgcggcgggcggcgtgtggcggatagtttgcgcacgacacaggcagcatattcctgcggcttcttcccggaaatgaccgccagggtcggcggggtctgcttgatatctgcaaccgaagcacacccaccaatcgccaaggccagaaccaacacactccacttcatacaaaacctccgataaagatcctacgacagcggggatggtatttttctcccgcccacgtaggatttatccctgataactcggtaaataactgttttaaattgtcgacgtcgttgaagacgggccgataataaacgcgctggggctgataaactccatcttaacctacgtatcgttctgatttttcagaaaaagcccttctggagacaccccccatgaaattcatccaccagcgcgagcacctcaacgagggagacattgttgtcatcgaatgctcgcagacttgtaatatccgtctgatgagcgatgcgaattttcgcagctttaagaatggcggccgtcacacttaccacggtggcgcattcgacaagttccccgccaaaatcaccgcaccgagcactgggttctggaacatcaccctggacgtggtcacgcgccgagccatcagcgtgacccgcaaacctgcgctgtcccacaagatccgcattgtgcgccgtaccagctccaagctgagctgacccgaacaccccacaggacatgaccgtgaccgccactaccaaatacgtgatcaagtacaagctcaatggcgaacgccgctttgagttcgcacaactgcagaccaacagcgtcgaagaagccaagcaagcgctggcgaaaattcacgatgccagtgatgaaatcaccgatatcaatgtgagcaaggcgctgtaagccgatgtccggccccaccgaagatctgttcgccgacgacgccttgcagcaacccgccgggcgcgagcaaattggcgaacagtcctgtgtattgaaaggctacgccctgccctggattgagcgccttctaccggaactgcggcgggtgctggctcagtcaccgtttcggcaaatggtcacaccgggtggttttaccatgtcggcggcattgagcagttgcggcaagttgggctggactaccgacacctccggttaccgttactcacccgtggacccacgtagccagcaaccctggccgcagatgccggataccctgcgccaattggccgtgcaggcggctgcagaggccggtttccctgactttgccccggacgcctgcctgatcaaccgctatgtacccggcgcaaaaatgtcgctgcatcaagacaagaatgagcgtcgctacagcgaaccggtggtgtccgtctcgctcggcctgccggcgatttttctgtttggtgggcacgcgcgtaacgacaagacccgcaaagtctcgctgttccatggcgacgtggtggtctggggcggcgtggaccgcctgcgctttcatggtgtgatgccgatcaaggaaggcatgcacccggtaatgggtgcgcaacgcatcaacctgacctttcgcaccgccggctgatttgaccgcaagcttcagagtgccaggtgttcgcgacccggctaatctggccgggatccgtcaagagtgcccaccatgactaccgaacaagacccgcgctgggcagccatactggcccgcgaccccaaggccgatgcgctgttcgtctacggcgtgaagaccaccggcgtgtactgccgcgccagtagcgcgtcacgcttgccacgtccggaaaacatcgagttcttcgacaccccggcgaaggccgaagccgccggttatcgcgccagcaaacgcgcggccggcgaccagacccagctcgcagcgcagcatgcacaactggtggccgacgcttgtcggcatatcgaacaggccgacaccccgcccagcctgaacacgttggcgcagcacgccaacctcagcccttttcattttcaccgcgtgttcaaagccgttaccggcctgacacccaagggctatgccagcgcccatcgctcgcgcaaggtgcgcgacggtctcaagggcgcgcactcggtgacggatgccctgtatgacgcaggcttcaactccaacagtcgcttttatgagtccgctgaccaactgcttggcatgaagcccagcgactacaaggccggcggcaccaatacggcgatcctgttcgccgtcgggcagtgctcactgggagcgatcctggtggcgcagagcgctcgcggcgtctgcgcgattctgctggggaatgatccggaccaactggtgcgcgatctacaggatcaatttcccaacgccgaactggtgggcgccgacccgggtttcgagcaattgattgcgcaggtcgtagggtttgtcgaagcgcccgcacttggcctggacctgccgctggacctgcgcggcacggcattccaggagcgggtatggcaagccttgcgcgagattccagcgggcagcaccgccagctacgcacagatcgccgagcgtatcggcgcaccgaagtcgttccgtgcggtggcccaggcctgtggcgccaacagcctggcagtggccattccttgccaccgcgtggtgcgcagtaatggccagctgtcgggctaccgctggggcgtggaacgcaagcagcagctactcgcccgagaacaggcgtcgaagacctagcggatcccgatgtggatcaacgccaggtcgtccgcctggtaagcctcgaaatcagtgacaaaggcacggacctgcgcgccaggctgctggaagtaggtccagatctgttgccaggcgttgatgatcgcctccggcatggggcctcgggcttcgaacaccaggtagcgtccggcttctattacaaggctttcaaacccgtccgccggcccagcggtggcaacacccgctgttacgtcaaattcgccatgcgcgtccgactcatagccgctgtacaccccataaatgggtgactcaggcagttttcccgggatgccctcgtacagtccctcactgaaaaatcgctgccacatcgggccgatcttcgcacttgacggtgtcatctcatccgcgttgcgcgtgcgtattttcaagcccgagacgcggattgccgcgatgtgttgctcctgaatgttgtgcaaagccatctcctttaaagcttcagtttgcgtttacgaaattcagcgaccttatgccgattgccacataacgccatgctgcaccaacggcgcttgtgggccttggtgcgatcataaaaccacaagatgcattccggatgctcgcagcgccggatcagattgaaatccccttccaccaacagcgtggcggccgcctcggcaatcggcgccaggaactgttccgccgtctgctgcttgcgctggcgctcaagcgttggcgtctcgccagcacgccacaccagctgcggatggctcactgccttgcgtaaaaagctgttcagcgccgccggattgccgggttgttgcgccttgcgtgcagccaccaattcacgaatcacctcgcgcagctctcgcgcggcgctgagcaaggcgcccggttcaaacaacgggatgccgttctgttcaacccactgcaggcgcaccagccaggcggctacgtcggcatcggtctgccagaaatcccacggcacgccgtcgatattcgcaagagtgttgagcatgtccagcaccggatcgtcggccaggacgtaaggttccgagggggcggcagtgggtggggaaagggtcatggggcaatcctctagtgagcggccacatcgtaaccgctgtttcgacaccaggatagttacaaaaagcacaacgctaacctgaataaatagtttgacaggttacaatattcggcgcagctttttaaaacggtaacccgtaaatcacctcaatcaagttacaaaaggctctccatcatgaccactccaacccctgtcgttcactaccgccacgtcgatgccgatggtgtgcgcatgttctaccgcgaagccggcgctgcaacggcaccggtcatcttgctgctgcacggctttcccagttcgtcgcacatgtaccgcgacctgatccccctgctcgccacgcgcttccgggtcattgcgccggacctgccaggctttggtttcaccgaggtgccggccgagcgcgattacgcctacagcttcgacaacctggcaatcacggtcgggcattttgtcgatgcactgcagttgacccgctacgccctgtatgtcttcgactatggtgcgccggtggggctgcgcctggccgtggcgcatccggaacgggtcagcgcgctggtgtcgcagaacggtaacgcctacctggaaggtctgggtgatgcctgggcgcccattcgcacctattgggccgagccgagccaggccaaccgcgaggtgatccgcaacgcagtgatcagcctggaaggcacgcgctaccagtacctgcacggcgtaaagcagccagagcgagtagccccggaatcctacatgctcgatgtactgctcatgcagcgccccggcaatgacgagatccaactggacctgttcctcgactatcgcaacaaccttgcgctttacccggcgttccaggcgttcttcaaggccacgcacgtaccgacgctggtgatctggggccagaacgacccgttctttatcccgccaggcgcccatgcctatacaaccgacaacccgaacgcggtggtagaactgctcgacaccggccacttcgccctggaaacccatgcaacccatatcgccgaacgcattcacgccgtgctgggcgacgccatcgattgatgatgcaccacgaaacgacgcgttcgtccagtgaataaaacagagtggccggggggcatgggccctgctaaaacagcgaaaagcctcactaacgctggagacgcatcccatgagcacctggccagacacccgccttctcgacctgctgggcattgaattgcccatcatccaggctcccatggcggtgggcacgaccaccgccatggtcatcgccgccaaccaggcgggtgcgctgggctcattgccggcagctgcactgagtatcgagcaattgcgcgatgcactgaccgccatccgccaggccagcccgcgtccgatcaacgtcaatttcttctgccaccaaccgcccgcgccagaccctgagcgtgatcgtcgttggaaggcactgctggagccctactaccgcgaactgggcgccgactttgatgcgccaaccccggtttccaatcgcgaaccgttcaatgacgcggcgtgccaggtcgtcgaagaattgcgccccgaggtggtcagctttcactttggcctgccggaaaagtccctgctggaccgggttaaagccaccggtgccaaagtgctgtcctcggcgaccactgttgaggaagccatctggctggaacagcacggttgcgatgcgatcatcgccatgggcagtgaagccggcggacaccgtggtttgttcctcagtgatgacctcaatacccagatcggcctgttcgcgctgttgccgcaagtcgtcgacgccgtcagcgtgccggtgattgccgccggcggcatcggtgatgcgcgggggattgtcgcggcctttgcgcttggcgcctcggcggtgcagattggcacggcgtatctgtttactcccgaagccaacgtcacggcttcacatcactatgcattgcgccatgcccaggccagcgaaaccgcgctgaccaatctgttcaccggtcgcccggcacggggcatcgtcaaccgggtgatgcgcgagttgggcgcgatcaacccggccgcaccggcgttccccacctccggcggtgcgctgataccgctcaaggccaaggatgaagcgggcttcagcaacctatggtccggccaggcactgcgcctgggcaaagacaccacgacctatgaactgacccgcgaattggcggagcaaacgctacagcgccttgcccgcttcggccgctaggccagcaccgcgtcaaccggctcgaacccactgagccggctttcgtgggccgggctcagcaccgcaaaacggttctggcgcagtgcgctgatgccatacaccacccgcgcaaagtgctcgttgtcatgggcatagggctggctgcgcaggatcagggcaaaaaagcactcgggctgacgagcaaggtccgcgccgcgaatggacgccagccctgtggcgaacaacgcgcggccactggcggctgacaagcgcccgtaactcaccgaacgggaatgatgaaaggcaagctcggcgtccgtcttggcctgctcgtacaacaggtccattgcttctatcgcgaaaagactgacggaggccttgtcgccagtgacataccgctgcacaagttggcgcacgccttcgcgccacgtgtcatcttcctgctcggcgcgcatggcgatccaatcaatgcagtccactaacgcgtcaccgcctgcggtgaggttcgccggcaatcctgattgcagcttttccaggtgcatcagcgcgtgttgcaccatggcagcttctgcgctcatgacctcgctcatcaggtcgagaatctccggcttcggctccccttgccaggtttgcaggaggcccaacagttgcgccctgaggtcgcgaacggcttcgacgccaagggtacggcgcaacaactcctccgactcgttcaccaggctggtaaggttactgacctggctcaacaggtcagcctggctgaacgaatggagcgtttcacgcccgggggcggaggcatcgaacgggctggggccgaactggtggaacacctcgttccacaaccgctggatctgccggtggatctgttccgtataacgcgacggcaagttgatcacgctgcaactgccttcgttgaaaaaccctgcccaactgatgcccagtgcgaagacgccatcgacctcatgactggcgtgtgccatcgactcatagaacttgtagcagaccactttattctgcaatccaggcagcgccttgaggtactgctcccaactacccagcgtgccgaaatagatgcgcttgtcggcgtccggatcaaggtggctgagggcgctgtccatgatggcggtatcaccctcgtgacgcaggcagagtgcaaagtgctgttgcggttggctgtcgtgcaggtcggaaaacaccagcacaccaatgccctggacctcccaaccattcttcagcaggtgttcggcgcaacggctggcctcggtataaccacaggtggtggaaacctcacggtagcccgtcagctcggccaactcattgtcactgcgcaaagtcttgcgcaaacgctcacgcatcgctgccagccaggtgggcgtaagcaggaacacaccctggctgtcgtcattgagcgctacgcttaccggtgtctcggcgggcagcggtacgttgagcacgggcacggcaaacttggcggccagggttgactgcttgagcaggacacgcagcttgcggctggcgatagtcacgtccacccccagatcgaccaagccgagcagtacccccaatttgcactcatggatgtaggccgcgtactcctccgggcgatcactgttctgcgccagtgcatagtcaaagctcacgtcgctgatgttggcgacgaaccggatcatccctgacagtaacagcgcgcccaatccaccggtggggccaatggacgcgatgaccaatgccgacaccacccgcacaaggcttttgaacatgcctgttttcgcgcggcgccgctcttcgtcggaagaaaatacggcgtagtccatctgctgtttgatttccgcgatggccgcctggcgtaactcgagcgcaaggtcttcggtggttcgaaacgtaatcggttgcggtggaaaacgccggtagtgatagccgtagcgttttttccgggggtggaaatccttgcgcgtcaggctgaatttatccaccggcggcaagtgcgcaccgatgaaggtcatcagcttctcactgggctgacctggcgccgtgctgggctgccactcaacccacttggggcctgcgatgttaagcgataccagcaacgctttgttggacgaaaacgccacgaccaaggcgttcggtaccaccttctccttgaacagcaacgcctgtggcttgaggtcgcccttcaggtatcgaaaggcgactgcgcgcaattcaacatcctgctcttgggtatccgccataaactggccaactcgcacccgggcaacggcgtcgcaggtgtcatcgaacaacttcttgaagtccgcgctattggaaaggctgtcgacatcggccaggaattccgcgaccagggtatccctcaaaccggacaccgctttgatttctgagggtgacagcggctcgccgtccaagtgtatttcgccgactttttcccggtaaaacgcactgcgctgtggctcgccgatcatcacctgggcgaaggaaaaatatttgtagcgcggtggactgtaggccgacatgcccgacgaatgcatggggtaacccaccaggtacttgtagcgaaaacgtttaccggtctctatccgctcggtagttccgttcggcaggccggtcttggccaggcaccgtttgactagcgattgaatgtaggtcttggtgagctgggcgttgcccacgcttcgggccaagccatcccacttctgccaggctctgggagctctcggcagttgatcgacgggcggaaggcgttgtggccattgtgtagtgtcccgggcgacgatctgtacagtaatcaatgcctgcgccgcatcatttcgcacataccagcggttttcctgatcgctgctgaccgagatcaattggtcgtcggccagcacgccacagttgacccattggcagcgatgattcatgtagacgctcaagtaatagccccatttggctcgcgaccaataggcctgcgggatattgacggtgtaggtctgttccgcaggtgttcctggcagtcgccgtagggtcacgaccacgcattgatcgacgccgatatcgatgtcgggcagcaccactgaaccggagacccagcggggcagaatcataaagtcgacatcggcgacgggctcgtcgaagggtacgagccaaacctggttctttgtcgggtccctggaatagtcgatgtagtcccccgaccgcgcgccaatccgcaaaccgggccacgcggtactgattgccttgggccaatcctttaacgacaacgcgatcaacggcacatcgaaccagatcttcgccagcaaccggttggtggtactccagacactgcacagcactacttcggtcttcaccaggttcctctcgggcaacaccagggtataggacgtgccggtggtaaccctggattgactggcggtacggatgctgtcgagaaagaatcgggtgaacgtcagttgctcggcgacggccccgtaatagcgtggcatccggggttcaacccgtaccgagcttttttgccatttgccaacgaaattcttccagtcataacgatcattaagcaagtgccacaacggcacttcctcccaggcctcaataatcggcgcttggtcggtgtcgtcagggtcggcgtagaccgagaacttcaccggcaccctggaagtggtcttgatcagcgccttggcctctggcgccagcctggaccgttgcaggacacggtcatcgatccagtgctgtatctggctctcggacgaggcaaggctggtcgccccgacgctcacataggcgtagcttttctccatgggttgttccttcccgaaagcgcctcactatccttgcatcggctgcccatggatgtaggccgcccatcgagtgatgcagagaaatctcggcgcatcgacgacggctttttttctgcttgccatttattcgctatatacctatacatacagcgttttgcagccctccagcacttctccaactacacaggcatcggagccgcatatgactttcagcaccaccccgcgtttagtatcgacctgcctggcgacgtggatcgccctgatggccaccgccgcccacgccgatgaagtccaggtggccgtggccgccaacttcaccgcgccgatccaggcgattgccgccgacttcgaaaaagacaccgggcataagctggtcgcggcctacggtgctaccggccagttctacacccagatcaagaacggcgcgccattcgaagtgttcctgagcgccgacgacaccaccccgcagaagcttgaaagcgaaggcgacaccgtcaagggttcgcgcttcacctacgccgtcggcaccctggcactgtggtcggcgaaggacggttacgtcgacgccaaaggcgacgtgctgaagaaaaacgacttcaagcacctgtcgattgccaacccgaaagccgcaccctatggcctggccgccacccaggtattggccagggaaggtctgaccgacaaggtcaaggacaagctcgtcgaaggccagaacatcacccaggcctatcagttcgtgtccaccggcaacgccgagctgggctttgtggccttgtcgcagatctacaaagacggcaaagtcaccagcggttcggcgtggatcgttccggcgtccatgcacgacccgatcaaacaggacgcggtgatcctcaacaagggcaaagacagcgccgctgccaaggcactggtcgaatacctcaaggggcctaaagccgctgccgtcatcaagtcctatggttacgagctggccaagtaaatgccgttatcgagtgccgatttttccgctatctggttgaccatcaaactggcctcactgaccaccgtgatcctgctggtcatcggcactccgattgccttgtggctgtcgcgcacccgttcctggtggcgcggccccatcggcgcggtcgtcgccttgccgttggtgttgccacccacggtgatcggtttttacctgttgttgaccatgggccccaatggctacttcggccagttcacccaatggttgggcctgggcaccctcaccttcagcttcgccgggctggtgattggctcggtgatctattccatgccgtttgtggtgcaaccgttgcaaaacgccttctccgccatcggcacacgcccgctggaagtggccgcgaccttgcgcgccaatccttgggacaccttcttcacggtgattttgcccctggcccggcccggctttatcaccgcctcgatcctgggctttgcgcacaccgtcggcgaattcggcgtggtgctgatgatcggcggcaatatcccggacaagacccgcgtggtctccgtgcagatctacgaccatgtggaagccatggaatatgcccaggcccattggttggccgggtccatggtggtgttcgcgttcctggtgttgctggcgctctactccagccgtaaaaccaggatgggctggagctgatgtcgatgatcaatgtacgccttaacctcaagtacgcaggttttgccctcgacgtggacctgcacctgcccggccgtggcgtgaccgcgctgtatgggcattccggttccggcaagaccacctgcctgcgttgcatcgccgggctggagcgcgccgaagacggcttcatccagatcaatgatgaagtctggcaagacagtcgtaacgggctgttcgtgccgccgcataagcgtgcgctgggctacgtgtttcaggaggccagcctgttcccgcacctgtcagtgcgcgccaacctggagttcggcctcaagcgcatcccgcgccaacagcgccgggtggatatggcccaggccactgagttgctgggcatcggccatctgcttgagcgccacccccagcacctctccggcggcgagcgccagcgcattggtatcgcccgcgccttgctcaccagcccgagcctgctgctgatggacgagccgctggctgccctcgacagccagcgcaagggtgaaatcctgccgtacctcgaacgcctgcacgatgaactggatatcccggtgctgtacgtcagccatgcgcaggatgaagtggcacgcctggccgatcacatcgtactgctcagcgacggcaaggccctggccagcggccccatcggtgaaacgttggcgcggctcgacctgcccctggcgcggggtgacgatgcaggtgtggtcatcaacggcacggtcaacgcctacgacgaccactaccaattgctcacgctgcaactgcccgccagcgccctgcacatgcgcgtggcccacgcaccgctggcgttgggcaaggcgctgcgcatcaaggtgcaggcgcgggacgtgagcctcagcctgcaagccgaggagcacagcagtatcctcaaccgcctgccagtcaccgtcacccaggaaattgccgcggacaacagcgcccacgtgctggtgcgcttggacgcaggaggcacgccgttgctggcgcgcatcacgcgattctcccgcgaccagttgcaactgcaccccggccaggcgctgtgggcgcagatcaaggcggtcgccgtgctggcttgagcaatcttttggcacgaccgcatacggctgcggtcaatcagacataccggcctgatgtgttgccaaggaacccgccccatgtccgattctgcgctgccccgcgacctgcattacgttgacgacacccagcccggcatccgtcgcaagacgctgcggggcaagttccagtacttcgaccccaagggcgagcgcatccgcgatgccgacgagatcaagcgcctgaatgccctcgccgtaccgccggcctacaccgatgtgtggatctgcgccgacccgcaaggtcatctgcaagccactggccgcgatgcacgtgggcgcaagcagtaccgctatcacccgcgctggcgtgaggtgcgcgacagcgacaaatactcgcgcctgcaggaattcggcaacgccttgccgaagctgcgtaagcagttggaagcgcaaatcgccgaacccggcttcacccgcgaaaaagtcctggccacggtcgtcatgctgctggacgccacgctgattcgggtcggcaatacccagtatgcgcgggacaacaaatcctacgggctgaccaccctgcgcacccgccatgtggacgtcaaaggcagcgagatccagttccagtttcgcggcaagagcggcgtcgagcatcagatcagcgtcaaggatcggcgcctggccacggtggtcaagcgctgtatggagctgccgggacagaacctgttccagtacctggacgaagacggtgagcggcacaccgtcagttcccaggacgtcaatgactacctgcatcgcctgaccggtgcggacttcaccgccaaggactaccgcacctgggccggcaccgccatggcgctggcggtgttgcgcgagctggaatggcagcctgagtcggatgccaagcggcatgtggtggcgatggtcaaggatgtcgccaggcaactgggcaacaccccggcggtgtgccgcaagtgttacatccaccccgccgtgctggagcatttcagcctcggtgaactctccaaattgcccaagccgaggctgcgcaaagggctcaaggccgaagaagtggcgttggcgatgttccttgagcaactggcggcggacttgccgaaaaaagccaaggcgggttaggctctgcctcccttctgatacgcaggacgaccgccgacgtgaaccactaagccttccaaaatgtatctgcaacgagccgcctggcgcgcttgttggcctgtccgacatttttttggaggtgctgatgactgacgtcaaccggctgcccgtgcttgtttccctgcaacacttatccttccagttcgccaatggcgacacgctgctggatgacctgaacctgtccatcgattacacccccaccggcatcgtggggcgcaatggtcgaggtaaaagcgtactcgccaaattgatcgcggggctgctgtcgccctcctccggctcgttgaactgcccgaacagcgtgatctatgtcgcgcagaacgtcgtggtagcaccaggcgataccgtcgccgatcttaccggcacggctgcgatattgaccgcccttgagcgtatggccgcaggcgccgcacagatcgatgaccttgaattgattgatgatcgctgggacttggccgagcgcttgcgtagtcgcttggataccgcagggttgtcgcggctttctgttgatacccccacccgtcaactcagcggaggccagttggccagggtcgccgtcatcggcgcgctgctagccgcgccacagttgctggtgctcgatgagcccaccaaccacctcgacagcgatggccgcgcctggctgctgcgtgtcctcgacgaatggcgtggcggcctggtggtggtcagccatgatcggcaattactcaacgccatggggcgcatcattgaactgtcgccgctcggcgtaaacgtatatggcggcaactacgacgcctatcgacaacagcgcgaggctgaacaacacgccgccgtcgccgcgctggaacacgcccgcctggaacgcagccgcgaaaaacggcgcctgcaaaaagaccacgacaacctgcaacgccatgccgcccgctcacgcaaacatgcggaaacggccaacgtcgatcgcttcaccaaagcgcgctggaaaggcgccgccacgcaaatcctcaacaccgtacgcagcgcgcatgagcaacacaaacaggagctggatacccaggtgggccaagcctatgcacgggtcgaggatgaaacaccgacgctgttggcattgcctgcttcagcggtgcccaacgggcgacaggtgctgtcgttgatcgacgcgcaattaccctggctgccgtcgacctgcctcaacgtccacctcgtcggcccggtgcgggtggctgtgcatgggcccaacggttgcggcaaatccacgctgctcaaagtgttggcgggagaatggcgtgcagaacgcggcgaatgccacgtgcacgtacccagcgcctacatcgatcagcacatcgcgctgctcgacgaccatcgctccatcgtcgaacaactgaacctgctggacaccccgctggcggagggtgaattgcgcacgcgcctggccctgctgcaactggatgccctgcgtgtgacccaacccgccgggcaactcagcggcggcgaacgcttgaaggctgcgatggcggttgccttgtggcgcgcagtgccggcgcaattgctgttgctggacgagccgaccaaccatttggacctggaatcggtgatggcgtttgagcaagccatgcaaggttttgccggggcaatgctggtggtgtcccatgacgcggcgcttgtgcaggcgatcaggccgacgcactttctgaattggcatcctgcgggttggaccctgacgcctgcctgaggtcattgcatgcgcgcttaaagcgtcctacggtagtggccggataatctcaccgaggaacccggccctatgttgccttcgccacgaaagccctacgtcaatgccgcactggcccatcgacaacgttggcgtggccgcgtcggactgatgctggtggccagcctgtcggtgctggcgggcatgaccgatgccatcggcttcatggcgagcggtgactttgtttcgttcatgagcgggaacactacgcgcctggcggtggcgataagcgcgggtgacctgggcctgaccgggcggctgctgttgctggtggcgacctttgtggtgggtaacgcgctgggcgtggtggtcagccgactcagccgtcgccatgccctgcccttactgctgtgtattgccgccttgctgtgcggcggtgcactgctgcccttcgccgataccttgcccgcgctgctggcggcgatcatcgcaatgggcatgctcaatgctgcggtggaagaggtcaacgggctgccggtgggtctgacttacgtcaccggcgcactgtcacgctttggccgtgggctggggcgctggctgctcggcgagcgccgcaatggctggcgcgtgcagttgatcccttgggccgggatgttcgtgggggcagtaatcggtgcgctgctggagcagcaactggggctcaaggcgctgatcgtcagcggtggattggcggggttgctggggctggtatcgctgaagatccctcggcgctggcacctgggtttcatgccgcgctgagggctaaaaaggagctcgcccgacgtttaggcctcgacgtccgtgtactggtaaagagccatcatgtcgggcgagcgggtgaatcataagcgaatgccttgcggctgtcgtgccaggcatttcctaaatcgactaaggcaacggattacaggcaggtcgccagtgcggccaaacgacgcttggccggcatattgtcttcgatggcgtagtacttgatggtggaaccgctgcccgcgctctgcacatcgacaaagtaatcgccggcggtggtgtacaccgtgaagccacccgcgccgattggctccttgaagccgccggcgtcaacgccgaacacactttcgtcctgccagccgaactgtacgcactcggcaacgaccagggtggccttgtccgaagccagggtcttgtaaggcgtgcctgcgcgcgcctctttcatcttcgaacccgcgcaaccggccagggccgccagtaccagtgcgccaattaccaccttgtgcatgccattgctccgttggaaaaaaacgcgactgtaccattgccactggccggactgatggccgcatgaactttgtttcactgtaaaggggcaaggcgcgacctatagtggtcacgctcatttttagaagtctcccttcggcccgctctcccgcgggctttttttcgtcccggttgtgctcagagcagccagcggaacagatagaacaacgccatgctcagcagcaccgtcatcagcacattgcgcgtccagaacatcaacgccacggcgctgatacccgccagcaggtaagggttggccgggctcaggttgagctggtggtcggccaggaaaatgatcggcccgcaaatcgccgtgagcatgcccggcaccgcgaatcccaaaaactcgcgcgcgccacggttaaggcgcaccggcaggcgtggctcgataaacaggtaacggttgagaaacaccaccaggcccatggccacaatcatgatgtagatcattgctgccccactcccagtcgcttgcaggcataccctgcgctcatgcccagcaggccggacaccaccaccgccgactcccaatgcaggaaactcagccacaccgagaacaacaacgacaccgccacacagaccaccgtaggaatgtcacgcaccaccggcgtaatcaacgcaatgaaggtggcggcgatggagaattccaggcccagctggtcgagaccgggaatgctcttgccgagcacgatgccggccagggtgaacaggttccaggcgatgtagaacgtcaggccgacacccagggcataccagcggttgaaagtctcgcggtcatagtgactgaccagcgcaaagaattcgtcggtcagcagaaagcccaggctcatgcgccagcgagttttaaggggagaaaggaccggccgcaaatgcatgccatacagcaaatgctgggaggtcagcagcaaggtggtcagcacgatggaaatcaggctggcgccgctcttgaccatgccgatggcaaccagttgtgcagcaccggcgaatacgatggcagacaggccttgggcttccaacggagtgaattgcgcatcaatggccatggaaccggccaacagtccccagggcgcgcaggccagggacaaaggaatcacggcgatggcgccgcgagcgaaggcgtaatgaggtaaggcagtaggcatggaaacggctcatcgacagacagtcgacaagcatgccagcgcaacagtggcgttgtcttgaacgatcttgctcaggcgagccgcaccgacacctgctccaccgaatcacgcgcttcgcgcagttcgtgggcatcctggttaagtcggtgaatggtattgagcaggcgctggcgcagcacttcatcgccgagtttctcgacggcgcgcatcaggtcgaacgccgcggtttcgttattttccgcgacggaatccagggtcttgcgcaggttgcgagtggcacgggtcacgcgggttcttccttcatcagcaatgggcaggcactttaggacattcgtgtttcattttaatttcaaacacttgtggtgattttcgagacatatgatccaagtcaattgaaacgggatttgacctacacatatggaaatacgtatattcggataaccatatatacgaaggccttgaccatgtcggacctcatctcgccccccaccctattcaaatgtctggccgatgccacccgggcacgcctgacgttattgatcctgcgcgaaggcgaactttgcgtgtgcgaactgatccatgccttggacgacagccagccaaaaatctcccggcacctggcgcaactgcgcagttgcgggttgctgcaggaccgtcgtcagggtcaatggatctactaccgcatcaatcctgcgctgcccgagtgggtgacgcaggtgctgcacaccaccctgcaagccaaccagccctggttgcacaacgacgcactgcgtctggatgcaatgggcgaccgaccacaacgggccagcagctgctgctgagccatcggagcgtttatccatgcttgtcgccattgcgatttttatcttcaccattgtcctggtcatctggcagcccaagggcctgggcgtcggctggagcgcaaccttgggcgcgatcctggccctggccttcggcgtgatcagcctggctgacattccggtggtgtggcacatcatctggaatgccaccggcacttttgtcgcgctgatcatcatcagcctgctgctggatgaggctgggtttttcgcctggaccgccttgcatgtggcgcgctggggacgcgggcgcggacggcgtttgtttgcctacatggtgctgctcggcgcgctggtgtcggcgctgtttgccaatgacggcgcggcgctgatcttgacacccattgtgatgtcgatgctgctggccctgcgcttctccccggcggcgaccctggcctttgtcatgggcgccggatttatcgccgataccgcgagcctgccgctggtagtgtcgaacctggtgaacatcgtctcggccgactacttcaagatcggtttcaacgaatacgccgccgtgatggcgccggtgaacttcgtcagcgtcgcggccaccctggcggtgctgctgtggttcttccgccgcgatattccacaaacctacgacccggccgacctggaagaccctgccagcgccatccacgaccgcgccaccttccgcgccggctggtgggtgctgggtatcctgttggtggggtgctttgccctggagccgctgggcattccgatcagtgctatttccgccgcctgcgccctgctgttgctggtgatcgccgccaaggggcacaagatttccacgcgcaaagtgctgaaggaagcaccgtggcagatcgtgatcttttccctgggcatgtacctggtggtctacggcctgcgcaacgccggcctcaccacttacctggcgacctggctcgatacgttcgccacctacggcgtgtggggcgcggccatgggcaccggtgtgctgacggcgttgctgtcgtcggcgatgaacaacttgccgaccgtgttgatcggtgcgctgtccatcgagtccagccatgccgtgggcgtggtcaaggacgcgatgatctacgccaacgtgatcggcagcgacctcggcccgaagatcacccctatcggcagcctggccaccttgctgtggctgcacatcctggcgcgcaagggcatcagcatcacctggggctactacttcaaggtcggcatcgtgctgaccctgccggtgttgttgatcaccctcgccgccctcgccctgcgcctgagtttctaacggagataccccgatgaaagtcctgttcatgtgtaccgccaacagctgccgcagcatcctgtccgaagccatattcaaccacctggcgccggaaggcttcgaagcgatcagctcgggcagctttcccaagggccaggtgctgccgcgcagtttgagcacgttgcaggcggcgggcatcagtaccgaggggttgtacagcaagggcaacgacgcctttgaaggcagcccgccggatgtggtgattaccgtgtgcgacaaggccgccggtgaagcctgcccggtgtatttcgggccggcggtgaaggcgcactgggggttggaagacccgtcggacgtccagggtgacgacgccagtgtgcaagcggcattcgacgccacgctgaagaccatcgccacacgttgccgggcgtttttcgtcctgcccttcgacgaactcagccctgccgacctcaaggcggaacttgcgcgtattgcgcagttgtaatcggaggccctatgaccaccctgcccaacctggacctgtccctggtcgactcaaaactcggcggcgcggaccagccgccgcgcatcctgctgctctacggctcgacccgcgaacgctcgttcagccgcctgctggtggaagaagccgcacgcctgttgcagcacttcggcgcacacacccgcatcttcaatcccagtggcctgccgttgcccgatgacgcgcccagcgatcaccccaaggtgcaggaactgctggaactgatgcagtggtccgaaggccaggtgtggtgctcgcccgagcggcatggctcgatgtcggcggtgttcaaggcgcaactggactgggtgcccttgaccctgggcgcggtgcgcccgactcaaggcaagaccctggcggtgatgcaagtgtccggcggctcccagtccttcaacaccgtcaaccaactgcgggtgctggggcgctggatgcgcatgttcaccatccccaaccagtcctcggtgcccaaggccttcatggagttcgatgaacaggaccgcatgaagccctcggcgctttatgatcgggtcgtcgatgtaatggaggaactggtgcgcttcaccctgctgctgcgcgaccgccccgacctggtggaccgttactcggagcgcaaggaaagcgccgatgaactggcgcgccgggtcaatcaacggtcgatttgatccccccggccagcgtatgctcgtgcctgtcccccgactgagtgaaatcgatgagcgccgtgcaacacgcctggctgggcaactatgaagtcagtagcacggcctgcaacgggctgacctttgcccgccatagccatgatgaatgtgtgatcggcgtgaacctggtaggcgaggaaaaagtctggctggatcgtcgcgagttccacgccggccccggtgccatcaccttgtacaatcccggccagattcaaggcggcggtgcggccgatggtgcgccctggcactttgtgagcttgtacgccacggcggaacaattggcggcggacctggggctggtgcacctggaatttgaccgtgctttatgtgttcagcccgagcttgccctgcgactggccgccgcgatcaagggagcgctaagcggtgacgcgctggttcgcgacgtgaatgaagacgccttggtgctgctgttgggtgaagtggtgaacatcagcggggtacgcctgcccggcagcgccaatcccggcaaacccctggtcagccgcgcccaggaattgctcgccgaacacctgcatcaacccctgaccctggaccacctgggcggcgaactggggctgtccaaattccacctgctgcgtgccttccagaaagaaaccgggctgacgccccgggagtgggccatgcagttgcgtacccgtcgcgccaaaggcctgttgcgcaagggcgtccccgctggcgaggcggcccacgacctgggcttcgccgaccagagtcacctgaaccggcatttccgggcggcctacggcatcacccctggccactaccaaagcaccgtaaaacgctgaacagcgcaatctggtccaagacaccgcgcctgcacatcctcacactgccccgcctcacttgaaggaaatgcaggcatgctgacgatctttttttatgcactgatattcggttttgtgttttgcctctcccccggcgccgtgctcgcggagaccctgcgccgtggcttgctgcatggctttacaccagccctgctggtgcagttcggctcactggtgggcgatgccgtgtgggcagtgatcggcctgaccgggatcgccctgctgatccagcatgacgcggtgcgtgtgccgttgacggtggtgtgtgcgttgtacctggcctggctgggcgtacgcagcctggtcgatgcctggcacctgccacaaccggacagcgcgcccgccagcacccggcaaaatgccctggcggtaggcgccgcaatttccctggccaacccgaagaacatcgtctactggggcgcactgggcagtgcgctgtcggggattgtcggcaccacgcccagccacgggcagacgctgatgttctttgccgggttcatgctcgcgtcgatcttgtcatgctttctgattgccgctctggtgaacctgttgcgtcagaacgcctcgcctatttggcagcgcatcagttatgccgcctgtggactggtgctgatctacctggcgctgctggcctggcaaggcctctgatcaggccggccagcggcggtgcaggtcgtcgatcacatacacgtgtcggtgcacaccggctgccgggtggaccaggtgcgggtggccggctggcaggtcagggtgctcatgcagcaccatcgcttgctcatgctccggtcgccacaggctggcgcacgcgatcaatgccagggtggccacaaaggccaggctggcaaacgtctgcgacatgccgaagttggcaccgagccagccggccagcgggtacgtcagcagccagcagatgtgcgacaacgcaaattgcgcggcaaacagcgccggccggtcctcggcatgggcggagcggcgcagcaagcgcccgcccggggtttgcgccagggaatagcccagccccagcacccaccacagcaccagcagttgccggtaatccgatagatacacgcctacactgagccccaggatcagcagcccaccgcccgacagcatggccacacggtcgctgaggcgcgccagcaacctcggcaacaccagcgctgccatcatcgaaccggcgccgaacgcggccagcgcaaacgccgtgaagcgttgcggcaaggcaaacccggcttgcaccagcaccacgctgttgacgatgaccatcgcactggcagccgccaccgccaggttcagtgccagcagaccgcgcaggcgcggcgttgcgaggaatatccgcaggccacgggtggtgcggtcatagataccgcgccgcagcttcacctgggcttgcggcaaaagcaccgacgacaccagcaaggccgaaaccaaaaaacccatcgaggtcccggcgaacaggctgtggaagctgatgacgctcaacagcatcgccgccaggatcgggctggccacactttccaggtcgtaggccagacgcgccagggacagtgccttggtgtactgcgcctcgtcggggaggatgtcggggatggtcgcctggaacgtcggcgtgaacgccgccgacgccgactgcagcacaaaaatcagtagatagacctgccacacctcggtgacgaagggcaacgccagcgcgaccagcgcgcgtgtcaggtccaggcccaccagcatcgccctgcgcggcaagcgctcggcaaaggcggccgccaccggcgcaaccccgatgtaggccagcatcttgatcgccaacgcggtccccaacacggtgccggcctgatcacctgccagctcgaacgccagcagccccagggcgacggtggtcaagccggtgccgatcagggccatcacctgggcgaagaacagccgacggtaggttttgttgccaagtacatcgaacatgggcgccccctggcgtgctgcctataggtatttggtcagttgcttgagctcagccagcgaagcctggccatccagcgtcacactgccttcgaggcaatggtcgatatggtcctggatcagcgtgcgcttggcctggcagaccgccttctccaccgcgtgcagttgctgggcgatatccacgcacgggcgctgcgcctcgatcatgctggtaatgctgcgcaaatgaccttcggcacgcttgaggcgtttgacgatggcttcatgggtttggtggacatgttcgctcattgagaggctccttagacgaagcctgatcgtatcccccccagggaggatgctggcaagcccgctcatctccgtcgtcaaaacaattagctcactgctcacaacgctgacttagtgcaagtaacgttacaaccgaagcagaactgaaacaggccttctatctgaacgaactctgaacttgtaatgaattaatacattaagcgttgacatcctgcatcgccctgagtagattgcccgtgcctgcaactggggccttttttaaacctcacaaaagaagccaatggacacagtatctagtcgctgtccgagcaccgccttggcgggcatcgggcgccaaacccagaacatgacaggactcgcctccccggtccggtaagctgcgctagagcttgatgctccaccgtaactgcctcgccggtcgcccgtccggtcccgaggtgtgttatgaccttgctaacccttgctttgcccgatgtacgcacactcgcggccgccctgcgcgccaagctgtgccgcgagcctgtaggcttttcgcctacccgctctgcctttgctgcaccctcccctcaaatgcgcccggctcacccgctggcgcattggcgtatctgccctgacagcggccaactggtccagcactgggatcacgccgaccctcaagacccacagagacccaaggtttccagcctggcccaggccagcttgatgctcggtctgtatgtgagcgctcgcgccgcctgacccggctggaaacagcaacttcctgattattgttctggagttctttatgaacacgtccagtagtagcccgctgcgcgttagttaattaacgcgctgttagcgggcgctgtagaagttatgtgaacaccttatttaaaccgatcgcgaagttagcgactcggcatgctttcgctcgcctgtcatcaggccggtaacgggtatgttttgtcgaaaaattggcgacaggagcacacaccatgagcgccgtaaaaaacgccccattgaacaaaaagagcagcagccacaccgacaccaaactgtcgatgcgtgccgcccgcgaagcccagaacggactgtcggccaccttggccaacgtccgcgccaccaaagacggcctcaccgagctggacgcccaggcgcgcctgcaacgcgaaggctacaacgaagtggcgcatgacaagccgcgtcacgccatcgtgcagttcctgcaggcactgaacaacccgttcatctatgtactgctgaccctggccggcatcagcttcttcactgactgctggctgccgatgcaggaaggcgaagacgccgacccgaccaaagtcatcatcatcatgaccatggtattgctcagcagcctgctgcgcttctggcaggaacaccgctcggccaaatccgccgaagccctcaaggccatggtccgcaccaccgccaccgtgctgcgccgtgagcaagtcggctcccaaccgaccctgcgcgaagtgccgatgcgcgagctggtggccggcgatatcgtgcagctgtcggccggcgacatgatcccggccgatatccgcctgatcgagtcccgtgacctgttcatcagccaggcggtgctgaccggcgaagccttgccggtcgaaaagtacgacaccctcggcgatgtcacgcagaaatccgccagttccatggccgccgaccagggcaacctgctggacctgcccaacatctgcttcatgggcaccaacgtggtcagcgggcgtgcgcaggctgtcgtcgtggccaccggggcacgcacctactttggctccctggccaaggcgattgtcggctcgcgggtgcaaaccgccttcgaccggggcgtgaacagcgtcagctggttgctgatccgcttcatgctggtgatggtgccgatcgtgttcctgctcaatggcttctccaagggtgactggggcgatgcgttcctgtttgccctggcggttgccgtaggcctcaccccggaaatgctgccgatgatcgtcagcgccaacctggccaagggcgccacggccatggccaagcgcaaagtggtggtcaagcgcctcaacgcgatccagaacttcggctcgatggacgtactgtgcaccgacaagaccggcaccctgacccaggacaagatcatcctcgaacaccacgtcaacgccttcggccaacgtgatgatgcggtgctgtccctggcctggctcaacagccatcaccagagcggcatgaaaaacctgatggaccaggccgtggtggagttctcggaacgtaatccgaagttccaggtgccgtttgcctacagcaaggtcgatgagttgccgttcgacttcgtccgccgtcgcctgtcgatcgtggtcaaggatgctgccgacgatcaactgctggtgtgcaaaggtgccgtggaagagatgctgagcatttccacccatgtgatggaagccggcgctgcggtgccactggatgatcgtcgccgcgaggagttgctggcgattgccaacgactacaacgaagacggtttccgcgtgctggtggtggcgacccgtcacattcctaaatccctggcgcgtcagcaatacaccacggccgatgagcgcaacctggtgatccagggcttcctgaccttcctcgatccaccgaaggaaaccgccggccctgcgattgccgcgctgcaacagattggcgtggctatcaaagtgctcaccggcgacaacgccgtggtcaccagcaagatctgccgccaggtcggcctcgatccaggccagccgctgctgggcaccgaaatcgaagcgatggacgacgcgacactgctgcgccgcgtggaagaacgcacggtatttgccaagctgacaccgctgcagaaatcccgggtgctcaaggcgctgcaagccaacggccacaccgtgggcttcctcggtgacgggatcaacgatgcaccggcgctgcgcgatgccgacgtggggatctcggtcgacaccgccaccgatatcgccaaggaatcagccgacatcatcctgctggaaaagagcctgatggtgctggaagaaggcgtgctcaagggtcgcgagaccttcggcaacatcatgaagtacctgaacatgactgccagctccaacttcggcaacgtgttctcggtgctggtggccagtgcgttcattccgttcctgccgatgctgtcgatccacctgctgctgcagaacctgatgtacgacatctcccagctggcgctgccgtgggacaagatggacaaggaatacctggccaagccgcgcaagtgggatgcgaagaacatcggccgcttcatgatctggatcgggccgacctcgtcgatcttcgacatcaccacgtttgcgctgatgtggtacgtgttcgccgccaacagcgtcgagatgcagaccctgttccagtccggctggtttatcgagggcctgctttcgcaaaccctggtggtgcacatgctgcgtacccgcaagatcccgttcttccagagtaccgccgcgtggccggtgttgatgatgacctgcgtggtgatcgtgctggggatctacgtgccgttctcgccgctgggcaccctggtgggcctgcaaccgctgccgatggcctacttcccatggctggtgggcaccttgctcagctactgctgcgtggcccaactgatgaagacgatctacatccgccgcttcaagcagtggtactgatctctcccgccgtttaaacggtggcggtcgcccggccgccaccgtgcactacaaggaaacaccctatgcgcgtcttgatctgtgcaggtcgtcattacgccgacaccaaaatgtcccgccaggtgctggacgcttaccaccgcctgcgcccggtgcaggtattgatccacggcggcaatcaattcctcggcagtgacgtcgaggaatgggcacgggaactgggcatcgatgtggtgcgctacccgcccaactggcaacgccacggcaaacaggcggaacgccagcgcaaccatttcatgctgaccgacagccgccccgatgtggtcatcgccctgcccggcggggacgacaccagcgagctggtgtgccaggccaaagccagcggcatttcggtactgaccgtagaaagctgaattcatgcgaggtgcatcatgcacaaaaaacacaccccagcccgtcaggacgggtttgccaaataccgtgcgcgtcactaccgcggtgcacgccacacgttactgctgctgccaccggccaaacgccgcgcgttgcagcgcaatttgattttcataggcctgaccctgggcatcctgttggcgattgccttgctgtcaaaagcccacgcggccggcggttcttatatggtcgacgacggtgcgatcaacgcgccaggcgaatgcaacgtcgacgcctggtacaccgccaaccgccacgacggcagtacccacacagaaacgctgtcaccggcctgcaccttcgccgcgctgccttcggtgcaatggggcgcggccctgtcgcgtgcaaccagcacagacaagggcgaaacccaggtgaacccgcagctaaaggcccaggtgtggtcgcgggaggatctgggcctggaactggccctgtccgccggcgcgcactttgccctggatcgtcatcacgggtttgatggcgcggacttcaatattccgttgacctggcaaccgctgacacccctgcggctgaacctgaatgccggctggtcccatgcctacaacgatggtgaccagaaacaccgcctgacctggggcaccggttttgaataccaggtggcgccgttgctgacgctgatcgccgaacgctacggccaggaaggcggcgaccaggcctggcaggccgggccccggttgcatttgggcgaattcgtcgacgtggacctggtggtcggccgcagcctgatcggtgatcgggcacagtggttgaccaccggcgccacgctgcgtttctaggccttggcttgttgttccaggtgcagttgcaattgcgggtcgatttgcaactgccctgccaggtcgtccaggtaattgcgttcggcgtcctgctgatcgtccaccagcatcacactggccaggtacacctcggccgccacggccgggtcgctggcaaactcggcgaaatccgcggcatccagcggcttggccacttcggcgtcgagccactcttgcagttgcgggtcgtcggtatgccggcccagctcattggagatcaactgctgctcttgctcatcgatgcgcccgtctgccttggccgccgcgatcaaggcacgcagtaccgcgtggctatgggcttcggcggcggagccgtcgagctggtccaccgtctggaaggcttgctgcggcgcgctggcctgctggcgttgccaggcttgataggcctggaatgcggccatgcccagggaggccagtgccgcgtagttcatcccgccggagcgcccttgggcaggacgagcgcccgtcgcaccgcccagcatgccgccaaggccacccaatagatcacccaggccgccaccggttgaagcattaccggtgctggtgcctttcaataaaccgcccaatagcccaccgaggccaccgcccgaagaagcactgccaccttgcccggcgcgcaagagttgttccagtaagtcgctggtgttcatggtgctaccctcccagggcgcagtgttggcgtttaacaaacatagcccggccttgccggaacaccatgaccgccgggcgggcgcgacttatcattgcgtcaccgcgccttcgagagaacagccacgtgaaccggattgaacacatcgcattgatggccaactacaaccagtggatgaaccgcaagctctacgacgcggccaacacgttgtcggacgcgcagttgtcgacggatcgccaggcgtttttcggctcgatcctcggcacgctgaaccatgtggcgctgggcgacaccgtgtggctcaagcgctttgccgggcatcccgccgggtacacagcgctggcgccgctggaggcgattgccgcaccgctcgacctgaggcagttggcatttgccgatatccgcgaactggccacccaccgcgcctggctggaccaactgatcatcgactgggcccacaccgtgcgcgagcccgacctggatcagcgcctgcactacagcaacatgcgcggcgtcgcagccgacaaaccgttcttcggcctgctggtgcacttcttcaatcaccagacccatcatcgcggccaggccaccaccctgctgagccaggtggggctggatgtgggcactacggatttgctggcgctgatcgaatgaactcggcgtacgcctgcagcaagcgcggaaattcctgaggttcgggcaattgcgcaaagctttcaacggcgggcgtggacacccagggcaatttttcgcgggtccaggtttccatgaaaggtacgtaatcgccggcgttatccagcaacgtcgcacgcacgttgacgaactcatcgatgccatggggacgggtgaacagccagctcatgcagtgcgggcaaaagtaatgccggtccacgccctgcaggccgccgatcaccgggcagccctgggtcaccgtaaaaccgctggcgggaatcaacgcgctcaaggagaacgcgctggaggacatcttctggcaaccggtgcagtgacaggccatggtgatcactggggcagcactcacgctgaaacgtacacgttcacaacggcagctaccctcttgcggcagggtgtcggcactcatcatcacttcctttcatggatggggtgggtggcaggttaacgtccgacctcgaccttgaacaggccatacacccaaccgaacgctgagctgcacctggggtcgtaaccttaggtgccggggttttactaccccgccctccccgcgtgcatcgtgggtctaccgatgcgcgtacccccaagaaggagacgcttacatggtcattcacttcaaggtcgccggccacctcgcctgtggtcaccacggcaacaacctgccttccagcaacgagctgaaccgggtcaaatgccgtacctgccgcaataccgaagcctacaaggaagcgcgccgcacccagcgcaatgccgcccgccgtgccaatcgcaaggccaagagccacaccgccgtcgactggcgcagtgcatggacacaacggttgacggacttgccagggttgcagcgtttgccacggggatttagtggtcagccgtttgtataagccgcacatgcaaaaaagccccggatgatccggggctttttttgttcttaaaaaagataagggcctgcgtcaggtttccccggcaagcccttgatatctatggtgcccgaacccggaatcgaaccgggacgcccttacgagcgggggattttaagtcccatgcgtctaccagtttcgccattcgggcggcagcgcgtgttgcagggttgggaatatatagatcccttcgcctcgatgcaaggtcgcaagacagctttatcgcacaactggacgggtgaaaaaagcttgttagatcagtgatctagattagcttttggaagccagtccaagagacctgttgctcggcaacccgccagctctggtactgtgacgcccccaacggaatggacacatcgcagaatggactcacgcaaggtatttacaatcattgccctggcagtgctcggcaactcagccgtggccgccgagaacaacaacccgtttcaggccgcgctgatgctcacgtcggtcgctccgtttgtgctgacctccggcgccctggcgttaacctccgctattcctgacctgttcaaatcctccaaaagcgatgcacttgcgtatatcggctcagggggagagatccgtggggcgcagtttgaacaggcatcgcgctactaccgttcaaactacactgcccccctaatgtctgacatgcagttggcccaggccattgccacgactctctgacccttcagcccaacaaggaagtcatcgctgatgcacaagtcccctacctggctacacacaaccctgtcgataccggtctacgcgactgcggtcgtgttttggatgttgaccgtctacctgatcgtcactgcgtcggtgaagatgctttcccgatttgtgacgcccgagcagattggcgaaggggtggccaacttgctcgtagccgttgccctggccgcattgggtagtggcctgtggaaactggccaggtatgtccggacgtcatccttcaaaaagccggcgaaggcgactttgacgtaactattctgtaacagacgcagcgtctggcgctggcttcttgagcgccagcgctggatcgggcacctcgacccagcccttcttcagatactcacctgccacgattttacgtatcaggaaacagtagatgatgggcaatactgcaatcggtatcgccgcccagggcgggcctgccaagaggcccagtccgagggcggccccccagatcagcaagtggcgccaaaggcccgcgaagagcaggtagagagggccgagaaacagtacggccaggacctgaaaggcgtcgacctcttcaacctggtcactgtccggatgtttgaaatagcgggtcattgcactgtccttgtggggtgagaagcccgaagaatctaacactggagaccttgtattcctactgaaccatcagcctttcctgacgagcctgcgggtcgctgcccattgatgttgaagccgactatgctaaggcgatgtgcctgatccgagacgtcaggctcgcccgcctctggttccccagcggctggtagcggaatacccgcagtgatcccccctatcggagacccgagatgaatcccaacgccaccgcccttgtcctgatcgaattccagaacgacttcaccaccccgggtggtgtgttccatgacgcggtcaaagacgtgatgcatcagtccgacatgctggccaacaccgccaccaccgtgcaacaagcgcgcacactgggcgtaaagatcattcacctgcccatccagttcgccgaaggctatccggagctggcattgcgcgactatgggattctcaaaggtgtagccgacggcagcgcgtttcgtaccggcagttggggggccgagatcagcgagtcgattacccgtgaacccggggatattctcgtggaaggcaagcgcgggctggatggttttgccaccacgggcctggacctggtgctgcgcaacaatggtgtccagaacctggtggtggccgggttcctgaccaattgctgcgtcgagggcacggtgcggtcaggttatgagaagggttacaacgtggtgaccttgagcgactgcaccgccaccttcaccgacgaacaacaaaaggccgtcgaaaacttcacgctgccgatgttttcgaaggtgttgcgccataccgagtttcttggggcgttgagcgcccagtaagaaaaaagggagcgactgatcactcagtcgctcccttttatttcatccgtcgagtggttttatccgttgagcgtcaaccccggataagcccgcaccggcaccttgtgccgctgcggttgctgccgggcaagctgcgcctggacctgcgcaaccgcatccagcacgcgttgcgcccactgctcgtcttccgggtcgacgactaccacgcgaaaaccatggtcgacgccttcaagctgcacgccctcggaatcatcgacatgcaagtcgatatcgaaggccggcgggaatttcgacggtgtgctcgtcagcccacgctcggtgagagcctggttgtgtcgcacgctgttgaccacgccatccacatggatgccatacagcagcaaccaacgacggatgtaggacggcgtgcggcccgacgaagtgtagacccacacgctgcagccctggcggcgcagctcgcgggtcagcttgcgggtgccgctgcgcagcggctcacccagccaacggtgcacacacgccggcaagcggctgtgttcggtcgcgctgtggtgcagctggcaggccagcgtgtcatcgatatcgaacgagatacggatgcgttgacgcttgaacacccgcttgattgtgtcgagcactgggtaccttcccatcattgatttccctgatacacaggcacaggtgtgtcgctcaggaaaaactccattggatcaggggccttatcttccaggaacgcggcatattttttcttgatcttgggcaattcgtacaaggccatgacgccatgcttggcggagttgcgtatgaccgaggacgggttgaaatagccctcggcgttgtccagcgtcaacacgaacggcgccaacccctcgcgcatcaacaggtagctgacgatcagcgagccactgcggtggttgccttcaatgaacaactgcggcttgctgaggacccgcacatacaccccggctgcgcgcttccacaccgactcgctgtggtgcttgcagtaccagttgtacaaatccttgatgccaccttcgacattgttgaaaaaatgcacttcggtggccgccaggtgctgggcgtattcacgcctgcgtaccgggtccgtgccgcacagcacggtggcgttgatctccagcatcaggttcagctgctgaaggtcgaacagatcgataccgcgcgccacatagtcgtcaatcagggcgtagccttcaagcacattctgcagcacttcgtccgtcagcgggtcgcgtggctcggtaaagtcccggctgagctgggcaaaacggctctggacctcacgcagggcgcgttcgatggcgagcaaatcaagacgacgtgttgcagtcattggcaatcctgaaaaacgatgaatagcgggtcagctgaacttgccgctgatgtagtccccggtcatttgttcgcgcgggttttcgaagatctgcgtggtcgcgcccatttccaccaggtaaccggtacgggtgccctgggagatgtccaccgagaaaaacgcggtggtatcggccacacggatcgcctgctgcatgttgtgggtgaccagtgcgatggtgtagtccttcttcaactcgaccatcagctcttccacccggcgcgtggcaatcgggtcgagtgccgagcagggttcgtccagcaacagcacttccggctcggtggcgatggcgcgggcgatgcacaggcgctgctgctggccgccagagagcgacaggccgctgaccttgagcttgtccttgacctcatcccacaacgcagcgccttgcagggcgtgcttgacgcggtcgccgaggtcgcccttgtagcggttcaggcgcaggccaaaggccacgttgtcgaaaatactcatcgagaacgggttcggctgctggaacaccatgccgatgtagcgacgtacgaccaccgggtcaacgcctttgccgtatacgtcctggccgaggaagtgcacatggccttcgaaacggaagcccttcaccaggtcgttcatgcggttgaggctacgcagcaccgtggacttgccgcagccggacgggccgatgaaaccggtgatcttgtttttctcgatcggcacatggctgtcacgcaccgccatgaaattgccgtagaaaatcttgtccagcttgcagtccatgaccacaggcgactgggtgataaacggagcggctacttgcgcagttgacatgttcaaaattcagatgctcccgttcttagtacttgggcttgccgaaaatacggctcacgatattcacgaccagcacgatcatcaccagcaccaacgaagccgcccaggcgagctcaagctggttgtcgaacggcatgccggagaagttgtagatcagcacggccagggacgccgtcggattcatcaccgccaggctgccgtcgtggtagatccagtagttgctgaacagcgcggtgaacaacagcggtgcggtttcgccggcggcgcgggccacggcgagcatgacgcccgtgaggatcgcgggcatgccggtgggcaagacgattttccagatcacctgcgagcgggtgcagcccatgccgtaggcggcgtccttcatgatcttgggcaccatcttcatcgactcttccgccgtcagcaccacgatcggcagcatcagcacggccaatgccacgccaccggccggggccgagtatgtgccggtggtcatcaccaccagggcgtaggcgaacacgcccgccaggatcgatggcaagccggtgagcatcttggcggcaaagcgcgaggcgttggccagcttgctgtccggccccagttctgcaaggaaaatcgccgccaggatgccgaccggcaccgcgatggcggcagcgataccgaccatcacgaaggtaccggccatggcgttgccgaagccgccgccagtctcgaaaccggtaggcggcagttcggtgaacacttccaggctcaggcgcgcaccgccacgggtgatcagcatgtagagcacggaaatcagcggcacgctggccagcagtgcgccgaaccacaccagggtggtcagcaccaggctgcgcagggcacggccctcgaaccggcgctgcaggctcggcatggccgtcatcggcgtagaaaggtcagtcattatttagtcccccgctgggcgtagaccatgatcatcgaaccgatgatgttcaccagcagcgtgatgaacatcagcaccagggcggcgtacatcaacacttcgatctcgttggggccggcttcggggaagttcagcgccaacagggccgccaaggtgttggccggtgcaaacagcgacagcgagatgttattggcgttacccaccagcatggccagggccatggtttcacccagggcacgaccgaggccgagcaccagggaaccgaagatgccggtcgcagcggacggcaccatcaccttgagaatcgcttcccagtgggtggtgcccatgccgtaggcggcttgcttggttttcatcggtacacccgtgagggcgtcctgggaaacggcagcgatggtcggcaggatcatgatcgccagtaccaatgcggccggtaacaggcccggcccgctgagggacgtgccaaaaaaaggaatccagcctagttcagtgttcagccacgcagtcagtgggcggatggccgggatcaccacgtagatgccccacaggccgtagaccacgctggggatggcggcgagcaattcgacgatggtgcgaaacaccgccgccagtttggctggcaggaaatcctgggtgagaaaaatcgccatgctgacgccgaagaaacctgcgatcagcaacgcgataagggcgctgtaaagcgtgccccaaatagctggcaaaatgccgtacttgccttggttaacgtcccagacactgccgaacagcacgtcgaaaccgtgcttttccatgccggggagtgccttgcgccctacttcgaagaccagcgcgaagaccagcgccagcaccaacaccacgccgatgcgtgcaagcgcacggaaggtacggtcaaccacgaaatccttggtagagggtggctggcacgcagaatccgggttgaccggtacgacaaagggtttgttcattggttgattccggaacaaggggggatcgctcccgacatggctgaccgcccatgccgggagtggcgtggcgagccttactggatgttggcggaagctttgcgaacttggtcgactaccgatttaggcagcgggatgtagcccatcgagtcggcgattttctggccttcggtcaagctgtactcgaccatttcacgcatggccttggccttggccgggttgccgttgtccttgcggaagatcatccaggtgtaggaggtgatcgggtaggacttggcgccatccggatccggcagccaggccaccaggctttccggcatcttcaccgcagccagggcttcggcaccgctttcggcgtttggtaccacgtacttgccggccttgttctgcaactgggcaaagtcaaccttggccagtttggcgaagccgtactcgatgtaaccgatggcgcccggggtctggcgcacggtggcggtcacgccgtcgttcttcggcgacttgatgaacttgtcgctggcaggccagttgacggtgttgccttcgcccaggtctttctggaactcagggttgatcgccgacaggtgcttggtgaataccgctgtggtgccgctggagtctgcgcgcaccaccacggtgatcggcagctctggcagtttcaggccagggttggcggcagcgatcttcggatcgttccacttggtgatcttgcccaggaagatgttggagtacacgtcgcgcggcaacttgagctctttagggttgcccggcaggttgaaggccagcacgatttcaccagcggtcatcggcagcagttgcacgccttcggccaccttggcgatgtcttcgtctttcatggccgagtcgctggcggcgaaatcgacggttttgttcaggaagtcctgtacacccgcaccgctacccttggactggtagtcaacggtgacgccctcggttttcttgctgaaatccttgaaccaggtgaggtagatcggcgcggggaagctcgcaccggaaccggtcagacggatgctctcggcagcaaacaccgaggtggcactgagagaaaccgcaacggcgagtgcagcagacttcatcagacgtttcattcaggaaaatccttgtgaattacgggctggggaactctgcaacaatcttgttacggttttatgaacgtggagtggcaaaacgcctggttgtccccctctccccccgcaatcaggcattttgacgtcattggttcgtaacaaattgagactaagactttgccatctcccaccacgcgagctccgtccatgtcctcgatcgaagacgccttgatgcaacgcatccaccgtgaactgctggatcacagtgacgaagagctggaactggaattatccgaagacgggcacgacctcaatgcgctgtttgacgaacatgtgggtgaaagcgccgaaaaaaccgcacgccgcatatacttcagcgagctgttccgcctgcaaggcgaactggtgaagttgcagagctgggtggtcaagaccggccacaaggtggtgatcctgttcgaagggcgggatgccgccggcaaaggcggtgtgatcaagcgcatcacgcagcgcctgaaccccagggtctgccgggtggccgccctgcccgcgccgaacgaccgcgaacagacccagtggtacttccagcgctacgtctcacacctgccagccgccggtgaaatcgtgctgttcgaccgcagttggtacaaccgcgccggcgtcgagcaggtcatggggttctgcaacgccgagcagtacgaagagttcttccgcagcgtgccggagttcgagcgcatgctcgcccgctccggcatccagctgatcaagtactggttttccatctccgaccaggaacagcacctgcgttttctcagccgcattcacgacccgctcaagcagtggaaactcagccccatggacctggaatcccgtcggcgctgggaagcctataccaaggccaaggaaatcatgcttgagcgcacccacatcgccgaagcgccatggtgggtggtgcaagccgatgacaagaagaaagcccgcctcaactgcatccaccatttgctcgggcagatgccgtatgaagaagtgcaattgccggtaatcgagttgccacagcgtgtgcggcaggaagattattcccgcagccccacgccgccggagttgatcgtgccgcagctctactgagtcagctgcaagctcgcccccgcaattacaggggcgagttgctcaccacccgcagcgccaggccctcataggcatccagcgtgatcgtaaactcgccttccgccgtcaagtcaccctcgacccgctcattgatgatgtccaccaccatgcccgcgccaatatccggcaaatgcagggtttcggtgatgggcgtggcaccgaagttcagcgcggtgatttgtatgcctttaccggccggcaattcatggaccatcaccagcagccccgggttttccacttccggcacctggatctggcggctggcggcgatgtcataggcacggcgtaccgcgaggattttttgcagctgcgaggcaaacgactcagggtcctgcaactggctgttgaggctgccatacaagcttttcgagcgcggcatctggccggcggacaattcggcatccgggttcaaatccaccaggtcataagcaccgcgatgaatccagcgcgtatcgccgtcctgcatcaagtgttcaacctcttcggccgccagcggcagcgcccccaccaggtcccagcccgacaaggcaaacacccccggctgcatggcgttgtacatcaccaacagcaaatggatctggcgtatctgctggatatccgcttgggtgatggcgtccaggtcgcgaatccccagcgccgccgtgatgatactgacggtggtgcaggacacgccgttggtgacgaacttgaggttgtacggtgcctgttcgccggccaggcgctcgtacatctgttcgcgaatgtgctcgcgcaggatgttcccgggaaaggtctggccctggtacaggaaagtgtcatgggcatgcagggtccagaagtgcaccagttccagggtcagttcatcgtggttctgcaacgcgtggatcagcgagccagggtcgatgccctggcggtgcatttcgcgcagcatcaggcgcaggaactcggcgtcgcccatcagcaacgcgtgctggtaagcgggacgggtgatgaagtcataggacaggtcggcgccgccatgggacatggacgcgatgtcgtccacggtgaggttcaactcctggaaactgaagccgccggccttgcgaatcgccccgccgagcaactggttgccggtgatcgacagcggatggctctcggaccaggccgtgccgtccagcttgcgctccacgccgaggaaaccattggcgtccaggcgcaggatcttcgcccccatcacgtcgatggcgtgcaatgcgtcgccgatgatcatctgctgcgcggcgaaagtcgggtccagccagttcagcgatggctggccttccttgaagtaatgcaggtagacccagcgacgcggcttgccatccacgcccagcaccacgtccgtggcgctccagtcggtttccttgacgccgggctcgaagaagatcacccgctgcagctggccgacgatgtagtgcttgtcacgcaatgcatcgacctgcgccgggctgaggttctgcgcatcgcggccctcggcgacgtcgggcagcaacgaccagtcttcttcgcggatttccaccatgtggtacaggccggggtagtcctcgtacgccatctcggccaggcggaagtccgcgcccttgccggtgtgggacgggatcacatcgtcgatgatcaccgcattgtgcgccgcggccatgcgcgtcaacgcctgcaactgcgcctcggtgcccagttgcgggtcgatctcgaaactgatgcggtcgaaattgccgtcgatggtcggcgtgtgctgtgtaccgctcaaaccgccggattttttcagcggaccgttatggatgccttggatgccgatcttcgacagcgcatgccacaacgcctcatccccaagcgcctccaacaccgtgccgccttcgcgggtcacgattgaggccgggtaggcggtaaaccataccgacgacaacgccgaagcatcccggggccgggtctgcgcgtaaggctgctgccacaaccggccctggcccgagtagagcttggcgcgctggcgggccgcgtgcagcatcgattgttccaccagccagttcacatggttgttttcagccgcagtcataagcgtggtacctgtcgtcgtggatgagtccaacgcggcagtatcaagtctcgataacaccgggtgtagtcatatgaggcgtcgaggggctattcgttgcattgaatgtggggttgcgtcgttcgaaatacgcagcgtgctccggactcgcatggagatggacgaactccctcatcatctcggaatgcggcagaaaacttgaagcgacaagcatgccccagcgttcgctcgggatcgtgttcaacatttcagtggatttcagtgtggtcgtcgaaaacaacctcaacaacacttcatcagaaatcacagcctgttttagtaaatacagttgtagtttgtgatggtcatcgggatggagttgccagagagaatcccccaagacctccaggttcaggaggatgaagttgttcagggcagctcttttctccctgttgtgacgctccgccttggtgtgaaaacgcggcgtgaggatatcggtattcgctcgaaaatatgtccagacggcttcagctttgtcactgaccctatcggcagccatcagccgcacccacagactcatggaggcgctttcaagtgtcgcgaattcgcagtctgtgcgatccagcaaggatctgacccactcaggctcggcataaatagcagtaagcaacgcggccaaagactctgctgactcatccaacatgccagtctggctgagtaattgctggaccagtctctgtgggtcacgctccaacaacgtttcgatcccctccagtcgcaacgctgtcagccgacggtaagttacaggcgactcctgttccgagcccaactcaaatgacgcgcatatcaaacgaagcattttcagttcaggcgcgataaacccccagctcaccaactgcttgaggtcatccgccgcgacggcatcactgaggttataaaattgcacaggatgttgacgcaaccagccccatgtggcctcgcccttggcaagcagcgacacgacatcgctgacatcctgcaacccttcaaggctttctagcacgccgtggtcgcagtcttccagtgcgctgatttgctcaggagccaagctgctgactattgcgcagaccaacgcctgctttggaccgctgtccacaaaacgttttgacgagaacagcccctcaagagactcagggtcggtgtcgtagatagcttgaatcaaggcgggggcgttttcacttgtcaggatggaatccaccacactggcaaagcgtggcatgaattgcgctgccgtgctgaggatcgcgttcagcttccacccatgggtaccgtggtccgcagccgtgtattgactgcacaggtaatcgaccaaccctgcaatcaagccgcgcccctcccccaacgctttttggtcaagtttgccgagcaccctctccgggttattgacgactgtcatcacctctggtgactcaccaccgcgcagggccaggatcaggttcttgtcatcctgcgtgagcgacccttcgtagaagaacccttggtaatcgtagtagtcggtgtcgaaatatccttcacgcatcagataaatcaacgcttttatagacccgagcttctgagtcagtacttcgccatactcggcccttgcagcctctctgaaggacatgcgctggatgcggatgctctgattgttcagcgcttcgattttcctggtaaaaacctcccgctcagccgtcagtcccgaagcgcgttcccggtatgacgtcaagtgcaagacgcgctcactctcaaccgtttttacctgagtgttaaagttgatgtgatggcgactttccatggacagcttccggtttttcttgatcatttcatcaaaaaactcgtcttgtacaaactccgtcaacgtcattgtcacttcgttgtcgtacgtgagatcagtggtgtccacgggattgatcagcttgacgacctgataccaaacgcaaaccctcagctcttccagactcgcaaggtgttcgcgctccacaatcgccagttgctctcgcacgtcagatatctgcgcatcaatctcttttgcctgggcaatacgccaatcaccaaactcattgaagacagaaaaaatcggcccgcgccgcttgagcagctcggcacaggcctccgggtacaagttgcgcacggccaccatcgccaacagtttgttaacgtccagtttcacgccgcgaccacccagcaggctggagaacaggtccagctcgttgatgatgttcttgatcaaccgcatatcgtcgatgtagtaacacaccgtctcgatcagcacagggtcgaaacggcgaattgaatcaaagcgttttgccttgagcaggtccatcatcttttcctgcgagttctccgagttgactacgggtaccacgggaatgatcaggtcaaagaactttgcctggtcgtcagcgaagaacagttcatcgcgtattgcatagatgaagtgcacgggacgcttgatttgtggtgattgcttgatggtgaagttgatttcgcgcaggcgaaaaaacacgtcctgaatgccaaatcgatcaaggtcctcgatcacgacgacgttgatatcactgcgttcgaaacagtagatgatctcgtcgacatgcttgtgcagcactgaaccatggtgaagggattccagtttcccgcctttgagggtcagcccgtcgatgctgaaaagcgacaagtacttcaaggcgcaatacagcaagtacacacccgcagccaggacgaacgccagggtccaactatccggcacccacaacagttgagtgataagccaatcgggaacgtatttgggcataggatcgacgaaaggcaggtacagccgcacaccacaggcaaccaacagggcgaagaacaccgtatgaaagaggttgcgggcattcgaggcgtgtacgatgcgtttcaaccgcgtttttggcaccttacgcgcaggtacggcgtagagcagctgctggacgatggtctcctcaatgcgtggcatcagatcatcgtttttggccggcggttcagccggcgatactgcacgctctgccgggttgtcttgactgaacgtggcaagggagacgaatacaggctcgtattcggggtgacgatcaaaaaaagtcctgatcacgctgctcttgcctgcgccgtacccacccgttatcgcaatgttgcgaacctgctcgttttcgagcgcgtgcagcaactcactgacatagcgatcagcctgcgccccctcgagcaatacaggcgtcaagtctacgaaaccttcttcactcaagggtatcgccttgtgcgctctccataccttgaggaaggcgctgatgctccgtttaaacctgatcactattccttgagtcactgaatcatcctttaacaatctgaggtgcggcatgaaagcgcccaccatgatagctcaatgccatcctcgcagtcctgcaatccatctcaacgtactcgctgggttccacacacagcggtgttgccatcgccagcaagccggctcctacagaaacgcttcattcagcgagtgtcccgatactgcctcggcgtaaaccccgtcgaggccttgaactgccgagtgaacgcactgtggtcggtgtacccgcactgcagtgccacctcggtgatcggcaggtcgctgtgcaataaccggtgggcgtgttccagccgcactttctggatcatctgccggggcgtgaggtggaacacgcgcttgcagtaacgctccagctgcgccacggaaatcccggcgatgcgggtcaactcacccagggtgacgcggcggttgaagtgcgcacggatgtgcgcgtccacggcggccaggcgttgataggcggggtggctctcgctggcggtttgcaaatcgaccgagatgccggccaggccgatgatcacacccgtgtggttgtacagcggccacttgtgggtcaggcaccagccgggttcacgggtgccatacaggtgcagttcgagctggtcttccagcacaaagccctgttccagcacgcggcggtcctgctcggtgtaacccggccccagttgtgcggggaacacttgtgcgctggtcttgcccagcagcggttgcagctgcttgaggccgcagcgttgtaccaacgtacggttggcgaggaggtagcgggcctgggtgtccttgatgaaaatcgccgcattggggatcacatccagcatcggcaacagctgcaccacaccggccaggaactgctcgatgctgtggggtcgattggcctcatccccttggcacagggccgcaaacgcagtctgcaacatgactttcgatcccctgttgaatgcctcgacgcacgcagattgcccgatggtttgagcgctgtcgagccacgaaaactgtgccgatttcgtcaccgatctcggcaaaaaacatcaatcgcgccgccgcccgtgagttcactgtatggccactgcatgcctatccaataactcacaagaaggcgacgctatgtcaggtcaaggcaagttcaagaaacaactttcattgatggacctcacctttatcgggctgggggccatcttcggttcgggctggttgttcgcagccagtcatgtgtcggccattgccggcccggcgggcattatctcctggctcattggcgggttcgcggtgttgctgctggggattgtgtactgcgagttgggcgccgcattgccccgcgccggtggcgtggtgcgctacccggtttattcccacggcccgttgctgggctacctgatgggctttatcacgctgatcgcattttccagtctggtcgccatcgaagtggtcgcctcgcgccaatacgccgcggcctggtttcccgagctgaccaaggtcggttccagcgacccgaccaccctcggctggctggtgcagttcgccctgctctgtctgtttttcgtgctcaattaccgcagcgtgaagaccttcgccatagccaataacctggtcagcgtgttcaagttcatcgtgccgttgctggtgatcggtgtgctgttcaccttcttcaagccggcgaactttcaggtgcagggttttgcgccgttcggcctgtccgggatcgagatggcggtttctgcgggcggggtgatttttgcctacctggggctcacaccgatcatctcggtggccagtgaagtgaagaacccgcagcgcacgattccgatcgcgttgatcctctcggtgttgctgtcgaccgcaatctacgtgctgctgcaaaccgccttcctgggcggcgtgcccacggaaatgctcgccaacggctgggccgggatcagcaaggaactggcgctgccctatcgggatatcgccctggcgctgggtgtgggctggctggcctacctggtggtggcggatgcggtgatctcccccagcggctgcggcaacatctacatgaacgccacgccgcgggtggtgtatggctgggcgcagaccggcacgttcttcaagatcttcacgcgtatcgacgagaagtccggcatcccgcgcccggcgctgtggctgacgtttggcttgtcggtattctggaccctgccgttcccctcctgggaagcgctgatcaatgtggtgtccgccgcgttgatcctcagctatgccgtggccccggtgaccgtcgccgcactgcgccgcaatgcaccgcagatggcgcggccgttccgggtcaagggcatggccgtgctcggtccgctgtcgttcatcatcgctgcgctgatcgtgtactggtccggctggggcacggtgtcctggctgctcggcctgcaaatcctgatgttcgtggtgtacctgttgtgcgcgcgctgggtgccgaccgcgcacctcgacctcaagcagcaagtgcgttcctcagcctggctgatcggcttctacgcagtgaccatcctgctgtccaagctcggcagttttggcggcatcggtgtgctcagccatccgctcgacacccttgtggtcgcggcatgcgcactcggcatttactactggggcgccgccactggcgtgccagctcacttggttcggctggaacacgaagccgatgaaagcgaagcggttgacgcgcctcacgccccgctgacgcctgcgacttactgattcaggagcgttttatgaagcgattgcacgtgatcgactcccataccggcggcgaaccgacgcgcctggtgatgagcggttttccggcgctggaaggcgtcacgattgccgatcagctgcaccacctgcgcaccgagcatgaccaatggcgccgcgcctgcatcctggagccgcgaggcaatgatgtgctggtcggcgcgctgtactgcgcgccggtcacgccgggcgccatctgcggggtgatcttcttcaacaacgccggctacctcggcatgtgtggacacggcaccattggcctggtcgcgtccctgcatcacctgggtcgcatcgcgcccggcgtgcacacaatcgacacacccgtcgggccggtcgcggctaccttgcacgaagacggcgcggtgaccttgcgcaacgttcctgcctaccgctatcgcgagcagatcgcagtgctcgtgccgggtcacggcatagtccatggcgatatcgcctggggcggcaactggtttttcctggtgtcggaacatggccagcgcctgcagatggacaacgtcgacgccctcaccgactacacctgggcaatgctcaaggccctggaagaccaaagcatccacggcgccgacggtgcactgatcgaccacatcgaactgttcgccgacgacgaccacgccgacagccgcaacttcgtcatgtgccccggcaaagcctacgaccgctcgccctgcggcaccggcaccagcgccaagctggcctgcctggccgccgatggaaaacttgcgcccggcgaaacctgggtgcaagccagcatcaccggcagccaattcgcaggccgctacgaatgggacggcgaacgtgtacgccccttcatcaccggccgtgcccacatgaccgccgacagcaccttgctgatcgacccgcaagacccttttgcctggggcatctgagccctccccctactggaaactggagtgaacaccatgagcgacaacatcttcaccggctgcatccctgccctgatgaccccgtgcacgcctgagcgcaagccggacttcgacgccctggtcgccaaaggccgcgagctgatcgatatcggcatgagcgccgtggtgtactgcggctccatgggcgactggccgttgctcaccgaggccgaacgccaggaaggcgtggcgcggctggtggcggccggtgtaccgaccatcgtcggcaccggcgcggtgaacagccgcgaagccgtggcccatgcggcccacgccgccaaggtcggtgcccatggcttgatggtgattccgcgtgtgctgtcccggggtgcctccgccaccgcacaaaaggcgcacttctcggcgatcctcaaggccgcgcccaacctgccggcggtgatctacaacagcccgtactacggcttcgccacccgcgccgagctgttcttcgaattgcgccgcgaacacccgaacctgatcggcttcaaggagttcggtggcggtgccgacctgcgctacgccgccgaacacatcacctcccaggacgacagcgtgaccctcatggtcggggtcgacacccaggtggtgcacggtttcgtcaactgcaatgccaccggtgcaatcaccggcatcggcaacgcactgcctcgggaagtgctgcaactggtggccctgagtaaaaaagccgccaagggcgatgccaaggcccgtcgccaggcgcgtgagctggaagctgcgctggcggtgctgtcgtccttcgacgagggctgcgacctggtgctgtattacaagcacttgatggtgctgaacggtgacaagggctacgccctgcacttcaacgaaaccgatgccctcagcgatgcccagcgtcgttacgcagagaaccagtacgccctgttccgccagtggtacgccagctggtcggcggaacagaacgtcgcctgacccttcgcgcgccgctgcgacgctcgcagcggccaaccctcttttttccaggaaatccccatgactctgacgggcaagatgctgatcggtcagcacgccactgccggcactcgcgaagcgatccgggcgatcaatcccgccaacgataccgccttggaaccggcctacctcggcggcaacggcgagcatgtcgcccaggcctgcgccttggcgtgggcggcattggatgcctatcgcgaaacctctctggaggcgcgcgccactttccttgagaccatcgccgcgcacatcgaggccctgggcgatgaactgatcgaccgcgccgttgccgaaaccggcctgccccgcccacgtatccagggcgaacgggcgcgcacctgcgggcaactgcgcaccttcgcccgcaccgtgcgtgccggagaatggctggatgtgcgggttgataacgcacaaccgcaacgccagcccctgccccgtccagacctgcggcaacgccatatcgcgctcggcccggtcgcggtgtttggcgccagcaactttccattggccttttccgtggccggtggggataccgcctctgcgctggctgccggttgcccggtcatcgtcaaagcccacggcgcgcaccctggcaccagtgaactggtgggtcgtgcggtggcgcaggcggtcaaggcgtgcggtctgccggagggcgttttttcgctgctgtacggttcgggccgcgaggtgggcattgcgctggtcaccgacccgcgcatcaaggccgtcgggtttaccggctcgcgcagcggtggcctggcgttgatccaggcagcgcaggcacggccagagccgattccggtctacgcggagatgagttcgatcaacccggtgtacctgtttccggcagcgttggcggccaggggtgaagcattggcccagggttttgtggcgtcgttgacccagggcgccgggcagttctgtaccaacccggggttggtcattgcggcgcaaggcccagccctggatcgcttcatcagcctggccagtggcttgctgccgacctgtggggcacagaccatgctcacgccgggcattgccagtgcctacgctgcaggcgtaggcgaactcgctgaacatgcaaaggtggccgcaaagggtttgccggtgacaggccccaaccagggccaggcccatctgttcgtgacccaggcgcaggcattcctggccaatgagcatctgcaagcggaagcgttcggcgccgcgtcactgctggtcgtctgcaccgacaatgaagaagtgcgccaagtatccgagcatctcgaaggccagctcaccgccacgttacacatggatgagaacgaccttcccgaggccaaggcactgctgccggtgctggagcgcaaggccggtcgcttgctggtcaatggctggccgactggcgttgaggtgtgtgatgccatggtccacggtggcccctccccggccacctcggatgcgcgcagcacatcggtgggtacggcggcgatccagcgtttcctgcggccagtgtgttatcaggatttccccgatgcattgctgccggccgcgctccagcacggcaacccgttgctgctgcgacgcctgcttgacggccagagagaggcataagcgatgtccgatcccgatatcgtcgtagtcggcgccggcatcattggcgtcgcctgcgccctgcaactggcgcgtcagggccggcacgtggtggtggtcgatcaacaggaacccggcatgggcgcgtcctatggcaacgccgggcacctggctaccgaacaggtgttcccgattgccgacgtgtcgatcctcaagcgcttgcccggcatgctgctggaccccatgggcccgctgcgcctggattggaaatacctgccgcgcgccctgccctggtttgcgcggctgctgttgaacctgcgtccggcgcgctaccagcgtaccgtcgcgggtattcgtgcgcttaacgaaggcagcctggacgcctggcagcgcctgctgcacagcatcggacgtgcgcacctgctgcgtgaagacgggtcattgttggtgtacgaacgagcggactcacgcgacgcactccaggccttgcagcagcgcatgcaagcgcagcaggtgcccgtggcgttctggaccggcgatgccattcgccaggctgcgccgcagttgagcgagcgcatccagggcgggctgtttttcccgagcaccgggcacttcctcgacccgtaccaggtggtgtgcgaactggtccaggctgccaaggccagtggcgtagagttcttcaagcgccaggtactggatggacgggttgaggaacacggcgtctccctcaccaccgatcagggcaccctgagcgcacgccaggtgttgattgcgtgcggcgcccactcggccaaattgaccgctgccctgaccggcaaaaaggtcccgctggacacggaacgcggctatcacctgatgctgccccacgagccgcatcgcctgccgtttgccgtcacctccctggaacgcaaattcatcatgacccccatgaccgacggcttgcgcctggctggcacggtggaattcgccggcctgaagcgcccggcaaatatgcagcgtgcctggcagttgcatcggttgagcaaggggttgtttcgggatgacctcaacgcagagggtgccacaccgtggatggggttccggccgtcactgccggactcgttgccggtgattgaccgggtgtgtgacgggaaggtgctgcttgcgttcgggcaccagcatctggggttgacgcaggcggcggtgacggcggagatgattggggaattggcgagcaagggtcaaacaccgttactcacgccttatcgcctcgaccgcttctgaccaacgcgtttttttgcggtgagttgcctgttgtggcgagcgggcttgccccgcgttgggctgcgaagcagccctgaaaacaaacaccgcgctctgtctgacaggcggcggtgttttctattgggggacttaatcatggggtttgagcagccgtgctgtagagtgcgtcagccatttcctcaatttcatcacgcatacaaagcttgttcagccaacccgtcgggatgccttgcacgccgtaatatgcacccgccaactgaccaacgatggcggcagtagtgtcagcgtcgtcacccaggttcgcggcagccaacaccgcgtcggcgaagctgtcagtatgttttacgcaccacagcgccgcctccaatgacgccacggcgtaaccggaacccgttatctgcgcacgggtcttgttgcaatactccccctgggcaatcgctacgactttgggcgcagaaagacccgcgcaagagatattcaacaggcgctccttcgttgctccactcaacgcgttaccgatggctctcgccaacaccacgcaacactcgattgcctcttgggctccgtgagtcgtacgggagctttctcgggaaaagtcatcaacgctttgcaggtttggaaagtaaaacagtaccagcggcgcgaggcgcatcatcgaaccgttgcctgcggaaaaaggctctgtcgaacctgcaaacggatcaccttgcgactcaaacgccgtgagcgccgtgcgcacggtcatgcctatatcaaagcaatcaccggtagagctcaggtaaccccacttccaccagttcaggtatcgccccatctggtcagctgcatcaaaaccacctttacgcagcaagctttccgcaaggcacaacgccatcgaggtgtcgtccgtccattggcccgctttcaggttgaacggtcctcctccaaccatgtcggtgaccggtgggaatgtgccgcgaggcatgaattcaacagtggtgcccacggcgtcgccacaggccaagcccaacaggctgccacggtaacgatccaaaagcgtgagagacatttgtcatcctttaaagaaagtgagtcagtcagcactttacttgaccaagcgcttctccttcgaggggcgatagccgaagtacgagctgtagcacttgctgaaatggctcggcgacacaaacccgcaggctaccagcacctccacctgtgacagctcggtgtgctgcaacagccgccgcgcctcggtcacccgcagctccatgtagtaccgctgcggggtggtgcccagttgctccttgaacaagcgctccaactggcgccgcgagcggccggcgtagaccgccagttggtccagctccaaaggttcttcgaggttggcgtccatcagtttcaccacttcacgcaatggcgcactgacgctgacgttttcggtgggtttgatgcggcggtagcgggactcttcgaaggccaggatgtcttcgatgccttcgacaagtgccttgtcatgcagggctttgatccagtccaacgccatgtggaaggcgccggacgggcttgaagcggtgaggcggtcgcggtcgatcacgtagggttcgctggtaacgtgagtggccttggagacttctgccagcgccggacggtgttcagggtgaatggcgcagcgatagccctgcaacaggccggcgcgcccaaggaaccaggcgccgttccacaagcccgcaaggctgatgccctgttcggcggcggtgtgcagcaggtggatgaaggcttcgccggccttgagttcggtacggaatccgccgcagatcaccaacaggtccaggtcgtgcaataccacggcatccaggcgcgcatcggggcgaatcacaaggccaaggtcgctgatgacttcgccctcgtcacagccgaaggtgcgcgaggcgaacagttcggggcgcagcaggttggcggtgacgaaggtgtcgagggtctgggtgaatgccggcagagagaaatgttcgagtaacaggaagccgacgcgggtgaccgacgccggctgttgggtttcgttgaggtagcgcaggttcttgcctttcatgccaccgctgaattgacgtctttccatcgagggttggcccactcttattgttgaggtctttgaaaaaccggccattacgggcgaacactgtagctgtggcgagcgggcttgtcccgcgttgggttgcgaagcgaccctggaagggggaatgcggtgaatcaggcactctgtggctgctggttttggggctgcttcgcagcccaacgcggggcaagcccgctcgccacagcgtatttatcgcctgttgtgcctagagacctggctgccgcaggcgctgatcctgagaaagccacacgcactgcaagcccccggctgaacagcggcaagcgcatctgatacggttttttctttgctatctgcgtctgtatcgaaacgccgtctgggcggacaatgaccccatccccactcccttcccttcggaggccttatgaccaagatggcacttttcctgttcggctttttggtgctgaccatcggcatcggcctgttggccacgatctcgccggtctgacgctcagccggcaaacagcatcgggtacagcgacagcaccagcagcccggccatcgtccagttgaacaggcgcaaccagcgcggctcacgcagcacattgcgcaagccgctgccacaccccacccatacacacactgggcaggttgaccacggcgaacaccagtgcaatcagcagcacattggtgacgtagccttcggccggcgtgtaagtggtgatagcgcccagcgccatgatccaggccttggggttcacccattggaatgccgccgcgccgaggaaagtcatgggcttgccctgctcgtccgcgctgtcggacatgccgcccgctgtcgcgatcttccacgccaggtacagcaagtacgcagcccccacgtagcgcaacaccgtgtatgcccacgggaacaccttgaacacttcgcccagccccagccccaccgaaatcaccagcagcatgaacccgatgctgatccccaatgcatggggcatcgagcggcgaaagccgaagttcaccccggaggcgaggagcatggtgttattgggcccgggcgtgatcgaggacacgaaggcgaacagcacaaaggcggacaacaagctggtagacatgaacatgacgcggcatccaaacggcgggggtgtgcctgcgacagtagagggttatcggctaccctgccccgtacagccagggccggattgaggcatacacttttttgccatggttttcacaaacctttcacagacaagcgcctagggtggcttcagctcctaatgaacatccctttagcccgcgctccccacgcgggcttttctttgccctgggtttatcgcaggcaaaaaaacaggcaagccgtgcttcacggcttgcctgcctggcctatcggttaacgcggtccgccgccagggccagggccgccgccctgaccatgcccgccaccgccgtgaccaccgccaccacccggtggcatgaacatcaagcagccggacaaggtcgataacagcgcgaccaccacagccgccttggttagataactcaacttcatgactacactctcttacttgacgagattgacttctcgctgggtatgacagtgcaaaccgaagtgcgtcacggctatcgtgtaacccgttggtagggtttgtagggccaacggtacaaactgctgttttagttctgcggccgctgcttggtcgaatccagctcggcttttttacccgtggaaatctcagtgatctgcgcagacttggcaatcgcgaaatcgaaggtgtcctgcatttttgcaatcgcgtcggtcgacgtgccgttcagcccaccgttggcggcccaatcgaagttccacacaccggagaggttatcggcacccggcacatcgtgggtttcgatggcggtgaagacgtcaggatgacgctccatgtacttggccgcatcggagacttcggccggcaccttgcccgaggcgttgttggccagttgggtcagttcctgcttggtaatggctgacttgccggtctggcgcatgtagtcggcgatcactttgctggacttggcgatgttcaacttgtcatcgaacaccgacggtgacgctttaggcgtgtttgccccgctgccggcgggcgttacggtggtagacatcggcgctgctcccctgatggtacgaatgaaatcgtcgtgctgacgatagccaggagcagacgttagcatgggcaatgggccattaatctgtgcttcacaacaattcacaaggccagggtctgcggcttctgtgaaagcctgcgaatccattaccatgagccggtattcatgctgattgattgccagccccctacccggaccccagtcatgagagacctaccacccaccgccaccctgcgtgccttcgaagtggcgacccggcacgcgacgttcacatcggcttcagaagagctgcatgtgacccagagcgcggtcagccaccaactcaagcacctcgaagacctgtggggcctgcagttgttccagcgcggcaaggcgttgcggctgactccggccggggccgcactggcgcccattgtgcgcgagtttttcatgaaccttgaggccacgctggctgacctcagggaacaaaaaggccgggttcgcctgaaggtcagcaccacgtattcgttcgccttgaaatggctgctgcccaggttgcccagcctgtcgcagcaacatccgcaaatcctgatcacgctggagaccagcgacaaggccatcaaattctccagcgcagacgcggatgtggccatccgcctgggcaacggcaattaccccggcctgcactcggagttcatgctccgcgagcagatcttcccggtggccagccccgacctgctcaagcgtttcggcgctccccacgagcccgccgagctgctgcgttacccgttgctgacgcgagacggcgcagacctagtgcccaagtgggaagcctggttcgagcatatcggcgtcagcattgcccccctcaaggaaagcgtcaggttcgctgacaccaacatgaccatcgaggcagcgctgctgggccaaggtattgcgctggcgcgaagcggccacgttgaagcggaaatcaacgacggccgcctggtcaggctgtttgagctgccgttcgcgtcaccggtcggctactactttgtgtgccccaaagggatcgaaacccagccgcatatcatcagctttcgtaactggttgttagccgagtcgatgcaggcacagcagaattatcagtgatgcatgaagaatcactcatgaccgaatgaaaagacttcgctgttaaacacgcacttgtggtgtttaccatggcgcatgcctttacccatcgttctactcatcctcttcgccgccctcttgcatgcaagctggaacgcgttgttgcgtgtcggcgccgacaggctgtggtcaatgaccatgatgtgcgtagcagtcgccatcgccagcttcgtaatagccttgtttctcgcccctcccgcgccagccagctggccctacgccgtgctgtcgggcgtgttgcacgtgggctataacctgttcctggtgcgaagctacaaggtgggcgacctggggcagacttacccgattgcccgcggctcctcgcccattctgatcacgctgtgcgcattggtgtttgccggggaaacggtcagcacaaacgcgctgatcggcattgtgctggtatcgggcggcattatttcactggccttcagacagcgcaggctggcggtgcccagcctgccctacgccctgggcacaggttttttcattgcggcctacagcgtcacggacggtattggcgcgaggctgtccggcgcaccgctggcctacaccgtatggatgtgtgcgctctggggcgtattgatgccactggtgtacatcggcctgcgcgatacacgcagcctcttcgcaccacgccccggcgtcatcacggccttgatcggggggcttgtgtccctcctggcctacggcatcgtcatttacgccatgtcccacgcgccgatgggcgccgtttcggccctgcgcgaaaccagcgtgctgtttgcggcattgatcggttattgcttcctgggcgagtcgctgactgcccgcaaagtgttggcgtgcctggtcattgcgatcggcacgatgctgataggttgatctttcacccctcacaggaggttcaagcaatggatacggtctcttcaaccccactgattctgatcaccggcggcagccgcggtgtcggcgcagcaaccgcacggcttgcggcggcgcaaggctacgatgtcgccatcagctacgtcagcaacgaggcggccgcgctcggcgtggtcgcggatgtgcaagcgttggggcgccgcgccctggccatccgcgccgacagtgcagaccctgaacaggtcgcgcagttgttcgctgccattgaccagacgtttggccgtctcgacgtgctggtcaataacgccgcgatcattgccctgcaatcgcgctttgaagacctcgacttcgcccgcatgcagcgcgtcttcgcgatcaacgccatcggcccgatgctgtgcgcgcagcaagcggtgaaacgcatgtcgctacgccacaacggcacgggtggaagcgtgatcaacgtgtcctcggcctccgcccggctgggcagcccgaacgagtatgtcgattacgctgcctccaagggcgccctggagacattcaccatcggcttgtccaaagaggtcgcccgtgaaggcatacgcgtcaactgcgtacggcctgggcatatctacaccgacatgcacgccagcggcggcgagccaggtcgcgtggatcgggtcaaggacagcattcccatgggccgcggtggcgagcccgaagaggtggcgcgcgctatcctgtggctggccggtaaggaagcgtcgttcatcaccgggaccttcctggatgtgacaggcggcaagtaagcggcaaccaccgattatcgggaggccagttggtcccggcgccgggccagcccttccagggtgaaccgcgcctgcatcagcaccacctcccgcaccagttccatctccttctggttcacttcgctccacttcaaggcttccagcagcttgggcttctggatgcggaaggccaggccctgggtaaacagcgccatggaatggatcaccgtgcgctcatcctccagcgccaggccggccacgcgcgcgatcagttcgcggatgacccgcgcaatacgcgccttgaaccgctcctcgaaggccatcgtcgcgctttgcgggcacaacccagcctggtggcgatccatgaacgcacgccatgccgtggtttgcgggctgtcctggatggttgaaaccacggtaccgagaatgcccagcgaggcgtcgatcagcgcgctgtcgccgcaatcggcatcggccaacacgctttccgctgcctccaccggcggcgacatcttgcgccacagcagcgtgatcaagtgctcgacgcacgccaggtacacgccttccttgccatcgaagtagtactggatcgcaggtgcgttgacgcccgcggccgtggcgatatcgcgggtcgacgcgccattgtagccccgtgcgccaaacacctcgacggcggcctcgatgatgcgtgcgcgggtttcttcgccgcgctggtaaccaccctcggcggcaggtttgtgtcgtgccatgtgcagctcccttcgaataccggaccaaaatataccagttgacaaaaattcgcgaaaaaacgaatttattccacccgttataaatctggagtgacctcgatgtcggctgcacctccctcccctcaggtcatgcctgaagaaactgtcaacggtcaacgcggcaaggcccggcgcatcctgctcagcgtggccggcgttgccttgttggcgggcgtgtcgtggggcgcctggtggtggatcaccgggcggtttatcgagaccaccgacgacgcctacctgcaagccgacagcatcagcgtggcgccaaagatcaacggctacgtggccgacgtgctggtgagcgacaaccagaacgtcaagcgtggcgacgtgctggtgcgcctggatgcgcgcaagtaccaggccgtgagcgatgaagcctcggcgaccatcgccgcacgcaatgccgacttcgccaaggcccaggccgacctggtgcaacaggactcgaccatcgccgaagcccgcgcccaattgcagggcgccgaggccgatgcccggcatgcgcagaccgaagtcgcccgctacgcgccgctggcccgctcgggcgccgaaccggaagagcgcctggcccaactgaacaaccaactggcacaggcccgcagcaccgtggcggccaaacaggcggcgctgcggtccagccagactcgctacggcacgttgcaggcccagctcaagcaggcccaggcgcaactgggcgtagccagggccagcgaggcgcaaagccaactggacgtcgacgacgcggtcatccgcagcccgctggacggccgtgtggctgaccgtggcgtacgcgtggggcagtacgtgcaacctggtacgcgtttgctgaccgtggtgccgatcagcgcgatctacctcaccgccaactacaaggaaacccagatcggtggcatgcgccccggccagaccgtcaccgtgcatgtcgacgccctacccggccgcgacctgcaaggccacatcgacagcctggcgcccggcaccggcgcgcagttcgccctgctgccgccgtcgaatgccaccggtaacttcaccaagatcgtgcaacgggtaccggtgcgcattgccctggacataccggatgacctgcgtgccgcattgatgccaggcctgtcggccaccgtggaagtcgacacccgcacccacgccgcagacgccaaccatggctgaggcgagcatggccggggtggctgccgagaaaccgcgcaacgcctcgctgaccgactggatcgccgtcgccgccggcgcgctgggtgccctgctggcgaccctggatgtgtcgatcaccaactcggcgttgccgcagatccagggccagatcggcgccaccggtaccgaaggcacctggattgccaccggctacctgatgtcggaaattgtcatgatccccctcgcggcctggctgacccgagtcttcggcctgcgccgcttcctgatcggcaccgcactcaccttcacgctgttctcgatgttctgcggcctgtccaccagccttggcgcgatgatcgccgggcgcattggccagggcttcgccggcggtgcgatgattccgaccgcgcagaccatcgtgcgcacgcgcctgccgccccaccaactggccatcggcaccacgatgttcggcatgaccgtgatcctcggtcccttgctcggcccggtgatcggcggctggctgacggagaacatcaactggcgctggtgcttctttctcaacctgcccatcagcatcgcgctgatcaccttgctgatcaccggcctgcccagcgaacgcatgaacctgcagcgctttatcagcgccgactggctgggcattctcggactggcgatgggcttgagctcgctgaccgtggtgctggaagaaggccagcgcgaacactggttcgactcgctgctgatcgtgtggctgagcattgccacggtcaccgggtttttcctgattgccgtggggcaattgcgctccagtacaccgatcctgcgcctgccgttggtgctcaacaaaagctttggcagcgtgttgctgatcggtacggcggtgggcgcagggctgtatggcacggcctatctggtgccgcaatttctcgggattttgtccggctataacgcgcagcagtccggcgcgatcatgctgctgtcggggattccggcgtttttgctgatgccgatcctgccgcggatgctcggccgctacgacctgcgctggatggtcggcgcaggcctgctgctgtactgggccagttgttttgtggacaccctgttgaccgccgacagcgtcggccatgattttgtctggtcgcagttgctacgtggcttcgggcagatcctggtgatgatgcccctcagccaactgtccatgcgttcggtcgagaccaaggacgccggcgatgcggccgggctctacaacatgtcacgcaacctcggcggcaccatcggcctggcgctgctcggcgtgttgatggaccggcgcagccacttccatgacgaccggctgcgcgaagggatcctggccaacagccaattgacccaggatcacatggccagcaacaccgccagctacctggcacagaccggcgacgcctccaccgcctcgttgcaagccatggcccaactggccaatgacatcgcccgccaagcctcggtgatggcctacaacgactcgttctacgtattgggactcgcaatgctggcgtgcctgcccctgatcttcatccttaaaaagcgcacggtacagccatgattgctcgctcgtttcctctgctcctgaccgttggcctgctatcggcctgcaccgtgggcccggactactcgggcgcccccgatgccgcgccgaaaaccctggccgccgggcacctgccccacgccgaccacaaagcgcccagcgcaccggccgtggcgcagtggtggcgaacgttgaatgacccgcaactcaatgaactggtcgacctggcgctgaacaacagccccgatatcgccaccgcccaggcccgcctgaaacagtcgcgcgccagcctcagcggtgcacgggccgacgccctgcccaaggtcaccggcgacgccgcgatgctcaaactgcgctcgcccgacacctccgcactgggtggcggcggtggcggtcgcgggccattgacgctctacctggccggcttcgatgccagttgggaggccgacctgttcggcggcacgcgccgtgcggtcgaggccgcgcaagccgaagccgacgctgcccaggcgcaactggctgacgcccaggtgcaactcgccgccgaagtggtgcaggcctacaccgacctgcgcgaccaacaggcacgcctggccctggtcgacgccagtgtcgacatcgaaaaccaggccctcgacctgacccagcaacgtcgcagccgtggtgtggcctcacagctgcaactggaacaagtcctcacccaggcagaaaacacccaggcccaacgcctgccgttgcaagccgccatcgttgaatccctggaccaactcggcctgctttgcggccaggaacccggtgaactggacggccgtctcgccaccgccaaagccctgcccgccatccccggcgtggtgcccgtggcagaccccgccgccctgctcaaggcccgccccgacatccgtgtcgccgaacgcaaactggcctccagcaacgcacagatcggcgagaaaaccgccgactggtttcccaagcttagcctgatgggcgacctgtcgttctccgccggcgaccccggccacctcgcccgcaaagacaacggcacctggctgatcctgccgcgcttgacctggaacgccctggacttcggccgcgtggccgccagtgtcaaaggcgccgaagccggtcgcgacgaagcgctcgcacagtacaaaagtgtcgtactgagcgcgctgcgcgacgccgatgtggccctggcgcggtacggccatcaacgccagaacgtcgtgctgttgcgcagtgtggaatcctcggcagtgcgtgcggcagacctgacccgccaacgctaccgtgccggcaccgccagcaccctggactggctggatgcggagcgcacccgctaccaggctcaggagagccggatttccggcgacgcggagttactcaaggattttgcttcgttgcacaaggcattggggctgggctggaccttatgacacactgcctcgccaagcgccgcctgacacgaggacagcatgctccgtattcatccagcaacccacgccgaccttgaagccctgcgcgacgtcggctgcaccacctaccgagaacacttcgcgcacatctggtcgcctgccggcttgcaggccttcctcgaccgcgacttctcccctgcctcgttgaaccaatcactcgaatcatccgacagccaaacgtggctgctcgcgtcggacgaaagcgagcggcccgtaggccttgccaagatcaactggtcagcccctgccccggtcacgggtgaagtgggcgcagaactgcgcaagatctactttctcaaatcggcggctgggcgtgggtatgggaaacgactggtgcaatacatctgtgaacaggccgtggaacgtggagacagcttgctgtggctgacggtactcacgtccaatccggatgcgcggcggttttatcaggcgtttggcttccaggtgatggggcaaattccattcaagactgacttggcagagattgggatggatgtcatggggtttgacctgaaacggttggggcaataaatggaagaattgatacgagggctcgacgggcccaggacggcccagcaggagttgttctacgacctggaagatgcggcggcagtgattggctggtcggtggttgagttgaccgctttggccgccagcggtcggacgccggatgaggtggcggcgctgatgaaaatctgcgcgttgctggcggcgcagcaggagaagatccgcgcgtatgcgggtgaggttaaggatcagcggattgtcagggctgacgtccggtaaatacgcatgttcgcgggttcaaaaagggatttacggatgccgttttcattggaagaaagaaccgcgttactcgcactcaaaggcgtgggaccaactgttattgctcgattggagcagatggggattacgtcgatggcggtgcttggcaaagcggatgccagtgacatcctgacgcaagaatcggcagcgttacagtcgacctgttggaagaatagtccgcaggcgcggaaggcgattacggcggccatggagcttgctaaaaagggcctatagaagttccttttgcaagtgtcccttcacactaactagcgcgcatcactaactacgcagggcagtgattattgaaatccttgacgcaataaaagttttcacctcagcaacatcttcaaactcagtcaccgcgagactcaacgacaagcgagttatttccagagcactacgttcgctttcgcccatccgcttagaaagttctccaaggtcttccatagactttttattttcaggcgtatcttttatatctttcaaaggaccaagcatagaaagtgcagtattgattcgttcacgataggcgttagcggcgctatgctgataattactttgttgatccaacatttgcagaagcccacttttataatcggcgactctagagcttttcaaagcgctatcggacaactcggtttgtcgttgctgctctataaatgccaggcgttgctgatccagtaaactactatactcttcacgctgagcatccatcatttcccgctgcaagctgatagttttcagaatagcaaccaacgtaacaacggaaaccatcgggccaaacacgccaccgaagaaagagccaaacgctgaccaattgttgggctcattagataggccatacctaaatacccacaaataagacgtcacagataagagtaatgcgataactaagatgctgattccataccgcaacacagcgtcgatacgcacaattcggcgtgcatttaactcatccaatgagacattcgacttttcaatcatcaaaggtcagctccctattttagaaacttcagaaatcacgttttcaaaggctcgtaagcccgagcaaaaaatgttattggcatatcttataattgttgcaaccgacggcgtattctaccccgacgcaagcctgttttcctcaactgctgctaactcagcattttctacacccaataaaaaccccgtagacgctaatctacggggttttcaagagtggaggccgaggccggaatcgaaccggcgtaggcggatttgcaatccacacaaatcatcatatttatcaaaaatatacgactctatcaattccgcacctccgagatttagggtggtcagagcccaaggaaatcgggggcacgatttcgattgcggaatggatttcctacgcttcgtcggcttcggtcgcaccggatgccatttcatactactgtgcatagatacagtatttagattaaccaaaccatgcacctcgatgaagaaacctgcgaatggctcggactgcccacgattatttaagctcaaccggacttaagggtctggcctgcacccattggcacgagggctagaaacggccctagaatggttggccgcgcctggccacagcgcgcgcttcaagactcccgagtggctcaaagtcaacgcgagtattggtaacgtgcgaaactaagccaccccatttgtccaacaaccgggctacactgcataaactttgataccacccccatcatcacactccctcacgcataggttaccaatgagcgtaaaagcatttgccactcagcttatgaattcaattaaagatatcaaaaacaatagtgaatcggtacagtgcgacagcttaattgcataccttgaaaaagtaatagctgatccaaacagcgaaccgacacccagccaaattgaatattataagtaccaacttcaattaatggttgagggagagaaaggcagtcacgcttcctatcttgaggagttccgcgcagtgattcagtcaggacaaaacgccatgaaaaccgcgcttttgatgaacggcggagcatcgattgccctacttgccttcattggaaaactcaccgagaagcagcagtatcaaatccctcacttcgcggaagctcttgcaatttttgttctaggcgttttcttcataggtgcagcttcaggtacgacttacttaagtcaatggttttatgcagagcccgaaaaatggaaaatacgcattggaagtgccttcaacactatatccatattgctcggcctaacctctttggggttttttgtttggggaatgtgcaaagcttattctgcgttcctagcattcacttaattacctactacttgcgttgactcctctcaaatatgcttggcaggcccgaagcgcgatcaatccttggtcgccggcgtcggtgatggcgacaattctttgagcgtgcgccggatccctcagggtctgaccccactttcttcaacagccattgctagggccaattgtttcgctgccaaagtagacataaccacctcaaacgtgacagacaatgaaaaatacacaatatttttttgtttttttaacgttattttacgcttgaagaaatacaaaaaattttgtaacctccaagaatgacagccccccctgcaccaagtcgcctcgctttagttttcaaaaagcgccgcgaagaattgaatatgactcaagaggatgccgcgcgccgggtgacagaacgccttgcacctcaaaaaaaataacgcaacaaacatatgcatcgtatgaaaagggtaaatcacagtcatcgaagcactccaccatcatcgcagacgtactggacctcccaattgctgtagtactagaagcaaacttaccgaacgggttcaagccgattgaatcagcgtctagatccaatgcatctctaattgcgccacacctcttggtgtgggacgagaaacctccactttacgacgaagtcgaggttccctttttcaaggaaatagaactgccaagtgattccggacggagcgaaatacaagagtgcggttcagtaaagctacgaatcagccaggctactctctcgagcatgaatatcagcgcagaaaagataatctgtgcgcaagtatctggagcgagcatggagccagtcttacctaacggtagtaccgtaggtattgataagagccgaagaactttgaaagatggcgacatgtttgcactaagtcataataatcaactccgcgtgcgaatcttatatcgcttaccgctcggaggcctgcggatgcgtagctttaacagagatgaatatcccgacgaagaatactcagcagaaagagttatatcagaggacatagtaattacaggtagagtattttggtattccgttctaaggtgatattttcatcaagcaccccgctgcagcactaggaattcgcatgctttattcgtaaaaaaagaccgatctaaataacatccctccaactctttgacagatttaattatggatcatgtaaaggattacctcgcgaaatacccgctatacgaatcactcagccaacggctgaaaatcttactgaaagacattgcggatgcggacaatatagacctgcatgcgatcgaagcaagagcaaaaacaccagatagctttgcatccaaaattactagacccggaaaagattattccgaccccctgtcagaaatcactgacctttgcggcattagagcaattctctattatcaagaaaatgttgaccaactcgctgacgccataaaaaaacactttaacgttagcacaacagactcagtggataaaagaagcgagttaaaccaagatcagttcggctatatctcactgcatctaatttgcgagataaataacgcccgcgcaatgcttcccgagtggaaaatatacgaagggctaaaatttgaaatccagataagaactgtacttcagcatgcctgggcatctatctctcaccagttacattacaaatcaaacgcggatgacaaggataacttcactagacagctctcgagaattgccgggcttcttgagctgtcagatgaacaattctcggaactcaaaaagaaaagagccactattaaaaccagcgtcaaacaaagtattgccaaaaaagatttagacctatcaatcaacagcgtctcgattgaacagtttctttcttcatctaaagtcttacgcgagattggggtcgcggttagaaaagcaaaatttaaacttactgaaagacagctagatcccgctcatatgttttcattctgccaaggcttacagattacaaccttacaggagctgaactcactactggaaaaattcgctcctagagcaattgagtttttcaatgagttcgcagaactaagcgacccgacatcgacattaggtggttatgggcattggggagctgtcgcaatagtaagcatccttcgcaacgaaaaagatttgacattcatcctggatgaggaaatctggagtgcggattacctcgaaaaggttaaatctacagccgacaagatatccttataacagccaacattatgagtcagtccggggtttcggccccgatggctcatacatagccgaaccaagccaacctcagatctacgatattttattgtatgcagtcgcaattttttgcattaacaaaatataccgtttaccacttaacaaatttacacgtatcgtctttatcgttatctctcaccgaagattacgagccatgcaaacgacacagcacagcaaaacccgccgctcggtctaccttcaacccgcggccgcaaccagccccgccgccgtagaacgcatccagcacagcaccggccttctgcccatcgtcaatcttgggcgcgcgaccattgcccccgcccccgcagcggttgcccgcgatgaccagggcccatgtggcgcgcccgctcaaggctgtgatgcctgaatagaagtacgtcgaacatcagatcgcgctgctgtcgcacatgttcacgatcgcacgctagtggggcctgacaaacaactccaccccttgcttcggtgtgcgccgcaacaaagagaccccacgggattattacgccgcgatatcgtgtggaatgaggtgtacgatgcagccgtacaggaactcaaagacgctatggacctggcttatctgaccggtcaacgacctgccgacgtactcaaagtggccaccactgatttgaacgccggattcttaacggtcaagcaaggaaagacagcgaagaaactgcgcctacgcctagaggatgacagtgtgctgtctgccctgagtgcctttatcaatgacctacaggcgcgtcgagcgcacaacggcattaaaacatcgacgctgatcaccaacaagtccggacttcgcatgagccagcagaagctacgcaatcgctgggacgaagcacgcgaaaaagcagccatcaaagccggcgccgacggcgactctgcgctggcagtactgatccgccaattccagttcaaggacattcggccgaaagctgcaaacgagatagaactgacgcacgccagccgcttgcttggccatacaacagaggagatgacaaaaaaggtctatcgaagagtgggagaaatagtaaaacccactaaatgagaggctctaggtcctcaacatactgctcaacgttccttctagacaagatcaaaaacttgtgaacatcgctgatagaaccttcgaagtgaaattccacccagtcgtactctttcattacatcaattgcactatttatcttctcacgcaattcatgagcaggcatcgaattagataaagatacagggagagcactaatcaacgccccatctatagttccgctcagattaatatcgctactatctcgaatcgtaatcagaccaccaccaatattaatggtattagacggagaattttttctgacctgtggtttcagacggttatgtttattgaaatttgtgtgagagcaaagatcagaaacccagctatctccacaattgtgaggctgaatagattcaaccaccgcgagcaggtctggtctttgttgcgccaagcccggaagattttttgagaggctttttacgaaactctcctcatcttttccataaggaaaatatggtgtgtttttcttttttgtataactctcccaaatatcctgtgctgtatattcaagcacgctccgcaagtgctccatcgtagacttaactaatggtttcaacacctctaactgaagatcatccgatcgagcgaaatcatatttcctctcaattgctaaaatattcgcactgcactcttctaaaagtgcttgtatgtctgcgcgccttttcatcagtcttttccttcattttatccgagagggtctgtaacgcgaatgtatcacttgaaccgataaacgaacaacgcagcacctgtcctgcaccgctgggggacaaacggaatttttggcaaaactccaggcaggttgcggaaggggtgagaaaagttgcggaacggatactaaatcgcaggcaataaaaaaccccgtagatcattgatctacggggccttaagagtggaggccgaggtcggaatcgaaccggcgtaggcggatttgcaatccgctgcataaccattttgctactcggcctcaaacgatcaatgtcctgactgctgacactcaccgcataaaaacttgagtgggctgtataaccctgcctctactctaactcattgaatacattgaagtttttaatgcttcgttgcgttcgatgggcgccattatgtacgtatttgcctaggcgtgcaaccccttgatttcaaaaatatttcgtattggcatcaaggggttgcgggcctgccctactccttgatgcgcagctgttggtactgcgggtcggccttgatctgggcgtcggtgaagggcagcgggcgcagttgtttttgggagaaggcttgggtctggtccttggcgtgtggggaagccgggttggtcgactcggagaacgcgagaatgccttgggcatggggcccctggtcgtcgaaggtgacgatttgcaggtagctggtgccgctgaccacttcgcgcttgccgtcggcgcgcggcacggtttgcatggcgttgtagatgccgagttcctgtgggccgccgtggatcggggtttgcccggagacttggatgtcgccccaggtgctgttggcggtcaggcccaattttgcgacgtcggcggtggaggccagcatggcttcgcgcagggctttggcgacgtcggcgcggtcgatcgccaggccacgtggcgtggtgaggggctgggccgggtcgaaggccacgcgccaggcgtcggggatttgctgcaggtgctgcaccaggttgatgaagtgcaccaggccgagaccgctgtcgaggttggcgcgctggtcccaggttttcaggctggtgcacaggggttgcaaggcagtggcgtcggtgccgaggtgtttggcgcagaactggagcaggtcaggcatgacttggccggccaggtacacctggttgtccatcaccatgtcgtgcaggtcgctgacgctgatcggtttagccagcgattgcagacgttgcaaggcgaaacgcgcacgcgggccgaggccgatgtggtcctggctgatcaccggggagaacccgctgagtggcgcctgggggttagccagccatgccgagtcgttggagtgctgcacgtagtctgtgcgttgcagttgcggcagttgctcggccgggaagatgccggcctgggcagcgcgcgggtcaacgtcccaggcgcaggcgctgtgggcgccgtcgagcatgatcatctgcaggccggcgcgtggatcgctgcattgtgccagcttggccgcgctgacattgggcaccaccgacaggttcatgtacaggctctggccctggtcatcggcggccagggtgttgacccacgggatgccttgcagggtgtgcaccgaggttttcaattggtcgaggctgccggcacggttcatcgcgtaccactgttgcagcacacggtcgttgcctaggttggcgtcgcgcaggctgaaggcgtagtggctgtcccaatcgagcttgcccggccactgcactaccgggccgaattgcgagctatagaccgtgtgcgattggtccttgaggctgccgtcggcttgtttgacctgcaccgtcaccgtggttttatccagggcgaccgatttgccgtcgagcaggtagcgcgtcgagtccttggggtcgagggtcaggcggtacagggtgaagtgcttggacgtgtccaccgtgtgggtccaggccacatgctggttaaaaccgatattgatcaccggcaggcccggcagcgcagcgcccatcacatccagctggccggggatggtcaggtgcatctcgtaaaaccgcatgccgcccacccaggggaagtgcgggttggccagcaacatgccgcgcccgttgaacgagcggtcacggcctactgccacggcgttactgccgcgatcaaaagcgaagcgctgttggttcgcggcagccatttcaaaagccttggcagtgctcgcaacgttggccgttgcttgaggcggcatcgcacccaccagggcttcggcgaattggccgacaccaccttcgaccaatagcctgcgggtcagcttgacaaggtcttcagccaccagcggccgtacccacgccgcctgacactgtgcaggcgcgccctgctctttcagataacggttgtagccggccacataaccttcaatacgctgctggatctgcgggctctgcgccctccagaacgcagcgaccgcgtccggcgtattgagccagccaaagaacaggtcactggccaggttgttgcgctcctccagggtcgcctgttcggggccaaagaagcgggcgcgctgaccatttacggtgaccacttcattggccagcaggcacaggttgtcctgggcgtaggcgtagccaatgccgaagcccaggccccgctcatcgttggcgcggatatgcggcacgccgtaactggtgcgccggatctccgccgatgcttgcgtcacctgctcccgcgcagcggcagccaggctcacgcccagcaacaccccggccacacacaccctggacaacccattggaaataatcacgcagactccaccgtcagatttaaccgcctcacaaggggcaataagcccaccgtaagaacgcaaaccaccaggaataatttagcgcgcagggtcgtttatttaaggcgatgcgcaggtgacaaaaccgatactgacgaaatttctacatccgacacttcatgattttgctcgctcgttcgtcttatcaactaagagcactcattttttcctgatcaggctctgataaggagtttttgcatgtacaacccgcaagtgcccacggatggacattcacaaatggccgaggccagtttcggcagcggcccgcaagcgttcggcaaagcgcccgaacagcacggcaaccagcgcatccgccatctgctcaagtgttttggcttgcgtaccagcctgatccggctgaaggtcatcgacgccctgctcaccgctgccgacaaccaacgcaccctcggcgtgcgcggcgtgcacagccatttgctggagctgggcattccgttgtcgtttctcagcgtgcgcgaagtgctcaagcgcctgtgcagcgagggcgtgatcaccctcaatgcggacaaaagctacagcctccatgaagaggctgccaaggtactcgaaggccgcgcctgatcgcctttagagcttgaccttgcggcgcatgatgccgttgatcaccaccacgaccactgcgacggcaatggcgatggtctggaatgtcttctcactgatgacgccggtgttctgcaagtaggacaggccaaacatcgtcgccaatacggtcagggcaatcagaatcgaatatttcaaacgctgcttttgggtcatgacgggttcctgaacctgaaaaatgtagccactgtgaatcgccggacctgccttacgcacgatggcgagcaggtccgacaggcgctcatgttacaggcgcgggaatactttggctcggtcaatcagccagcatgcacccagcgctggtgcagccaccgcgcaaacgcatcgagcgcaaaccccagcaaaccgatcagcaccaccatcgccatcagctccgaataagccagccgatcacgggtatcgaggatgtaatacccgagccccgcactgacccccagcatctcgcacggcaccagcacgatccacaaaatgccgatggccaagcgcacgcctgtcagcacatgccctaccacgccgggaatgatcacccggcgcaaggtctcccagcgggtcgcactcaaactggcactcaattgcaaccagcgtgggtcgagctgacgcacaccggcagcggtattgagcatgatcggccacacagcggcaaaggccagcaggaaataaatcggctggtcgcccacgcccatcagcatcaccacgataggcatccacgacagcggcgagatcatgcgcagaaactggaacgccggcgtggtcgctgcctccagcttgcgcgagctacccactagcagccccaacggcacgcccaccagcaaggccaggaacagtccgacgaagatgcgcttgaggctcagggcgacatgcagatacagctccccgcgcccgagcaattcccacaggctggcggcggtggcggacagggaaaagcgtgccgacaagccgtccgccgcgccaaacactttcacccccaaccaccagagcaacagcaaccccgccaagccactcaacccgagcaaccagcccgggatttcacgcgtgttcaaacgccgatctcctcatgccgctcaaagccatcaggcaaaccaaaggtcttcataccgcccacggactcgatggcgttgcgcacgaagcggtcgtccaccaggtccttggcgacaaatgccgggtccaggtcggcgaggaatttcttgtcgccctcgatcaacgtgtccttcaggcgacgcaccagctcctcggtgtagctggggaatgggtagggttggaagtcgatgcggtgctcatcccaattggcgtgctggatcgcgccgtccgccaggtaggccgcacggtcggcggcggccggtgccagcactttgctcaacaccggctcggcgtgtggggtgtagcggttcggaccgtccttggacagcagcttcactgcctcttcgcggttgtcgcgggtccagacctgagccttgacgatggcattcaccaccttctgcgaccactccgggcggttggtcaggtcgttctcgtgcatgaacaccacgcagcacgcatggttgcgccacacgtcgccggtgaagcgctgcacgcgaccgaccttgaggttttccgccagggcgttgaacggctcggcgacgatgtagccatcgatgcgctggctggccagggccggtggcatgtccgacggtggcaacacgatcaggttgacctcattggccgcaatcgcactgcccgccgcccgcgccaccggcgtgaggccgttgtcacggaacagctgctgcaccaccacgttatggatcgaataccagaacggaatcgccaccgacttgccgcccagttgcttcacgtcagtgatgcccggcgccacggtcaagcccgagccgcccacatggttccacgccaccactttggccggcaccttgctgccatagcgtgcccatacggtcatcggtgacaacaagtgaatcacgttgacctggcccgagatgaacgcctcgatcacctgcgcccaactgcgcagcagcaccgggcgctcggccttgatgccttcggcttcgaacaggccattgttatgcgccaccagcaacggcgtggcgtcggtgatcggcaggtaaccgatgcgtacgggggcgtccggctcgctggcggcgcgggcctgcagactgctcagcagcggcaaggctccggcggcactgagcacggcggagagtttgagaaagtcgcgacgcgagtgggtcaggtcatccaggcacatgggcaggctccagcaggtcaagtgagttgggttgggggcggctcgcctgccgtagggttttaaggatatcgatgcgcagcgcgccgatggcttccacctgttcttcgcgcggttgcggcaggtcgatcagccactcgcccaacgtccgcgccgggcggttgcccagtagcaggatgcggtccgacaacagcagcgcctcgtcaatgtcatgggtaatcagcacggccgccgagccttgctcgcggttgactttgagcagcaggtgctgcatgtcggcgcgggtcacctcgtcgagggcgccgaagggctcgtccagcaacagcacctggggctggcgcgccaggcaacgggccagtgccgtacgctgggccatgccgccggagagctgcgccgggaagtgctggcgcgcatgctccaggccgacggcggcgatggcgtggtcgacacgctggcggcgttgctcaacgctcaagtggggttgacgagcgaagtccaagccgaaggcgacgttcttttccaggctcagccagggcaacaggctggggtcctggaaggccaccgccacgcgcggatgaggcccatccacgggttctccgagcacccgcacactgccgccctgcggcgcctgcaaaccggcgagcacccgcaacaggctggacttgcccaccccgctggggccaaggatcgacaccacttcaccgggctgcagttgcaggtcaaagccctgcaacaccggcccgccggcataccccaggcaaatcccccgggcgttcaatacggcgttcgtcataggttggcctggcgctgcaactcggtgcgcaactgcaccaggctcggggtcacgatgggcacaaacgcggactcacgccagcgccgcgcaaaaccactgccgtgggcggtgaggtaggccttgccgccgctggcctgcaactccagttgcacggcgctggcagccgtttcggccagggcgatgcgcagcttgaacaacggcaccggttcggccgcaaagcgtccggccaacaggccgttcttcagctcggtgaccaggtgatccagcgtcacgcgtagcgtttccagttcttcgcgcaacaccgtacgggtcgcgcccagatggttggccacttccgccagggaacgccgggccaggccgatggacatgccgcactgcaaccccaggaacgccgggcgcaccgccggcaaaaacttgcgtgcatcttcatgcagcaaccagtcgcgactcaactccacgccttcgagccccagggccgcggtattgctggactgcaaacccaatagttccaggtcgcgggagcgctgcaggccggccaccgagtccggaatcgccaggataaacggcgcaccacccccgacctgctcgatggcagccgcagcgacaaaaccgcttttgcgcaggttggtcacccaatgcagccggccgttcagggtccagccgtcgtcagtgggttcggcgctgatctgcaaggcctcgataccggacaagaacttcatcgcgttggacaaccccgtggcccccgccaatttgccgctgagcaggtccggcaacagtcgctcacgtagccgcgcattcgggctttgcagcaaatattcgatgaacgaacgctggccccagcacacaaacgccgccgccagggaatggctggcaacattggcgatggcctccaccgcacccgccacatccccgcccaggccaccgagttgagccggtacgccgatacgcaatacattggcctctgccagccgtggcagcacttcctgtggatcgcaactgcccacgtccagggcctgcgcttgaacatcgagccaacggctcaagattgggtcaagcattcatgtttctccttttcacagcgggtgagccatcttcagcttgcgggtttttcccagcggtattgcgccagctccgggttcaacggggtgcgcgcaaacacgttagcgaagttgcacagggttgccaggctcacgcccaaaataacttccagtgcctggccctgggtataaccggcggccaggaacgcgtcaaaaccggcatcgctgacatcgccacgggtagcgatcacttcgcgggtaaacgcggcgagtgtttcgtagcgggcattgggcagttggccacgttggcgcagggcgtcgatgacttcttccggcaatttggctttgttgcgtgccacggcagtatggccggccacacagaaatcgcagccgtgggtggtggccgcaatcaactgcaccacttcgcgatcggccaggctgagttcggccttggcattcagcccggacacggtgatgtaggtctccagcgccgccggggcgttggccagtactgccagcaggttggggatgaagcccgagcctttcaacgcattttccaggaagggcttggccgcttccggcgcggtttcaggggtgagcaagggtacacgggacatggaggggtctcctgatgggttcgtgtaaccagtctgttggttataaaaaatcgtctcaataggctaaagtagcgattacttgctcttgagtctttccattagatgaattcgtccagtgcacttgtcgattggttattagacagcctcgaactcgacaccagcctgttccatgtgggccgctattgcggcgactggcatgccagcacccatggcctggcaagcgcgagtttccacctgattgtgcagggccagtgctggctgcatatcgagggcgacaccacgccgcatcggttggataacggcgacgcggtgttcctgttgcgcgacctggagtatcgcctgtccggtgagcccacggctgccggcgcccacgaatgcccccgtgtaccgatggagcccctggacagcgccgcccacgacggcgtcggcctggtctgcgggttcttccactttcagtccggcttgtcggcgatgatcgtcgacagcctgcccgcctggatcatcctgcgcgcaggcgacccttcgctgacggccgcgcgcaacctgttcgaactgatcctgcacgagtgcgagcgcgtgccggcgccctcttcggccctgcttgaacggctgtgccacctgctgttcctgtatgtcctgcgccagcaggtgctggacaaccgtgaactcggcggcctcgcggcgctggcccggcaaccggcgttcaccaacctgctggagcagttgatcgcccaccccgccgacacctggaccctggagagcatggccgcctgtaccgggctgtcgcgctcggcgtttttcaaacgtttcaatgaactgtgcggacagtcgccgggccaagtgctgctgatgatgcgcatgcgccatgcctgccagctgttcaagcaggaccagaccgtggcggatgtgtcgctggccgtggggtatcagtcggtggcggcgtttacccgggcgtttcacaaggtcaccgggcagcagcctggggcgtatcgcaaggcccaggcctagcgctgcaaaccagtgccgggccgggcgcaaagctcgatcagccagtctacaaatacgcgtactcgctgggacagttggcggtgtggcggatacagcgccgacagggccattttcggcaccgccaggctgggcaatacctgcaccagggtaccttctgccagttgacgcgtcgcgtggtaagccggcgcctgaatcaagccgaacccggcttcacaggcagcgaagtagccatcggaactgttcaccgccaagccttttgacaggttgaacgtgcgcaattggccgtcgacttcaaactccaggccaaagcgtttgcccgtgacgctggagacgtactcgaccatctgatggttggccaggtcctccaacgatgccggaataccccggcgcgccagatataccgggctcgccaaggtcagttgatccatcatcgccagaggccgtgccaccagcgattcatccagggccaaaccaccgcgcagcacgcaatccacgccttcacggatcaagtccaccgggcggtcgttcagactgatctccagttcgatgtgggggtagcgggccgtgaatgtcggcaatgcagggatcacgatcaagcgcccgatgcccgacggcatgtccacactcaaggtgccgcgcgggttctggcgttgcgtggaaaacaccgcctcggtttcctcaaggtccgacagtaattgcacacagcgctggtaatacgctgcgccatccagcgtcgggctgacttgccgcgtggtgcgctgcaacaattgcacgcccaggtgtgcctctaattgcttgatcaacaccgtgaccgaggcgcggggcagttgcaggctgtcggcggccttggcaaagccacgcagttcgacgatccgggtgaacacgcgcatcgcgttgaaacggtccaaggggcggttccttgcgctgattatttagatattacgaatagtgttagtgcttttagccggtttatcgcagttttgtcgagcgtgacaatgcaggccttcccacccaaggagcaacacccatgcatacccgccaactcggtacacacggcccactcgtctcagccatcggcctcggctgcatgggcatgagcgatttctacacccccggcagcgacacccgcgaagccatcgccaccctgcaccgcgcactggagctgggcatcaacttcctcgacaccgccgatatctatggcccgcacaccaacgaaacactgatcggcaaggccatcgtcggcaagcgcgaccaggtgttcctggccagcaagttcggcatcgtgcgtgacccggccaaccctgccttgcggggtgtgaacggccgccctgaatacatccgcaacgccatcgacggcaccctgcgccgcctgggtgtggagaccctcgacctgtactaccagcaccgtatcgacccggacgtcgccatcgaggaaaccgtcggcgccatggccgaactggtgcaccagggcaaggtgcgttacctgggcctgagcgaagcctccgccgccaccctggaacgtgcccacaaggtgcacccgatcagcgccctgcaaagcgaatactcgctgtggagccgcgaccaggaacataacggctgcctcgccacctgccagcgcctgggcatcgcctttgtgccctacagcccgctgggccgtggctttctcactggcgcgctgcaaagcccggacgacttcggcgccgatgactaccgccgcttcagcccacgcttccagggcgagaacttcgccaagaacctcgaactggtcaaacaggtgcaggcgctggccgccgacaaaggcatcagcgccgggcaattggccttggcgtgggtgctggcgcagggtgatttcatcattccgattcccggcaccaagcggcgtaaatacctggaagagaatgccgccgcgctgtcggtcagcctcagctcgagcgaactggcggccctggaggctatcttccccgccgaggcgcccgctggcttgcgctaccccgaggcggtgatggccatgctggatatctgaatcgaaaccgcgccgctcaccggcgcggttttttcttgcacgatagtacctaaagctccgccctgccaggccgatagccctacgaagctctaacaaagccgcgtcgataataaacgcttcgtaaggacgaccccatgcccccactgcgctccatccaagcccgctataccctgttcctggtgctgttcgtcctggtgttattggtgttgaccgtagtgggtatcggccagttggtcgcgcccaaactgcagcacaccgaagaacaggtggtgctcaaccgtatcgccgaggtcgccgagcagatccagggcgaactcaacaaggtccagtcccagcaacgcagcatcacccagaccgttccattgctcgacagcgatgccatcgacaaggtcctgccgggcctggtcgaccagtatggcgagctgaaagtcttcggcggcggtatctggccgctgcccaaccagcgcactccggggcgcaacaagcacagtacgttctggcaccgcgatgcgtcaggcaagctggccgtgaacaccttctggaacagcgacccggcgcccaactattacgaccagagctggtacaagggcggcctcgcctcgcctcgtggtcaatgtgcctgggccgccgcctacaaggacgacgccagccaggagccgcgcaccaactgcgccatggcgatccagcgcgacggcgtgccctacggtgttgcaaccatcgacgtgaccctgggcttcttcaatgacttggtcgccagcaaagagaaagacatcggcgggcaaatgctgatcgtcgaaggcgacggcaagatcatcagcaacagctcgcgcatcagcggcccggtggtgttgaaaaacatcagcgaactcaccggcacctcggcgtttgccgcccaggtcagcaaagcgctggcccaccgcgaccaggcgctgcaacgcaatgagttcgacaaccagggcgtggccagcaccttctacatgcgccctatcgaaggcaccccgtggttcctcgccaccgccctgcccacctcgctgatcaccgcccagcgcaatgacgtgctcggcaccctggcgctgttgcagatcccgatggtgctgctgctggtgttgctcgcagcgtatgcgatccgccaactggtgcagcgcatgaagacgctgaaaaccaatatcgacgcactctccgccggcgacgccgacctcacgcgacgcatcaccatccgcgccgaagacgaactgggcgccatcggccattcggtgaaccgctttatcgtctacctgcaaaacatgatcggcgaagtgacccaggctaccggcgccatgtcgtcgagcctggcgcagttgcaacagacctcggcgcataccaaccagatcctggtgcggcatgcctcggagactgaccagacggtgaccgccatcaccgaaatgagctccaccgccgacaccgtggcgcaaaacgccgccgaaaccgccgcattcacccagcgcgccaacgagcatgccgaccgttcccgcgtggtcgtcggtgaggcgtccaacagcgtcagcgcgttgatcggtgaagtctccagcgccacccacagcgtggagaacatgcgccaggacgctgcgcgcatcaccgaaaccctcggcgtgatcggcgcaattgccgggcagaccaacctgctggccctcaatgccgccatcgaagcggcgcgggccggcgagcaaggccgtggtttcgcggtggtggccgatgaagtccgtgcgctcgccgcacgcacccaggccagcacctcgcagatcaacgacatgctcacgcgcctgacggcaggcgtgagttcctcggtggcggccatggaaaacacccaggccagttgccagtcggcggcggacgccactgcgcgggtaaataccgggttggatgaaatggccggctccgtcagccacatcaacaacctcagcacccagatcgccacggccgccgagcagcaaagcgcggtgaccgaggagatcaaccgcagcatggtgcagatccgacaaatggtcgaagagctggtgcagagcggccacgctaccgaaaacaatacccagagcctgctggaggcgaatggtcgggtgattaccttgatgggtcgattcaaggtgcgctgataaacggctgagacactcccgtgcaatgtgcgggagtgggactattctgacagttccaagacgcacaggaggtgtgccatgcgcgcagccgagcagtcggtccgcttggagcggatcagtcaggaacgttttatccacgctcccatcgatgccgtttatgactatgtgacccagccggatcgctggcacgaatggcatcccacgtccctcggtgccgacaccggcaccaccggctctctccccgccggcgcccgcttcaccgaaatgatcgacctgctgggcgtacgcgtccccatgagctaccgcgtgcaaatcgcccggcgccccggcgagttcaagaccgtgtttacgtccctggccgtggatggttcgattcattacttcctcatgccccaccagggcggcacactgttcaagcgggtgctgacctatgaaaccgaactgcaactggccaccctgcatgaacgcatgatcgagctgtcggcgattgccctggaccagctcaagcaccggctggaaaacccaccgttcgtataatcttgaaacattctcgccgtgcaggcgctggcttgcctgcgatgacgtcgtcatgatcgccgccatcccaatggtcacctcctgcacgcgagatcctatgaaaaccccattgcgcctggccctgctgtcaaccctgttcaccgccaccctggcccaggccgctgacctgatccccatcgacgtgcaccgcgacgccaactgcggttgctgtaaaaaatggatcagccacctggaaaacaacggcttcaaggtcaatgaccatgtcgaagccgacatgagcgccgtcaagcaacgcctgggcgtagcgccgcgcctgggctcgtgccacaccgccgtgatcgacggcaaattcgtcgaaggccacgtgcctgccgaacaggtgttggccctgcgcaagcgcgacgacctgctgggcgtcgccgcatcgggcatgcccatgggctcgccgggcatggaagtggaaggccgcagcgaggcctatcaggtcatcggcctgacccgtgagggtaaagacgtggtggtggctgaatacccggcgcaatgatcgcgggttacctcgggcttttcttcgcggcgttcggcgccgcgaccttgctgcccctgcaatcggaagcggtgctggtcggcctgctgctcagcgggcattacagcctgtggctgttgctgggtatcgccaccctgggcaatgtgctcggttcggtggtgaattggtggctggggcgctgggtggagcacttcaaggggcggcgctggtttccggtgaatgaccagcaactggacaaagcccgcaagcattaccagcgctgggggcattggacgctgttgctcagttgggtgccgatcattggcgacccgctgacgttggtggccggggtgatgcgcgagccgttgtggcgattcctgttgctggtgaccctggccaaaggcctgcgttatggcgtgctggccgccgtgaccttgcaatgggtgttaatccccacttaatcgccagttaatccttgggcaacagcatccgaaccctctttctcggagccctgcccatgcctctgttccgcgctttttgcatcgccggcctgctcacggccaccgccgccccggtatttgccgccacctacggtcctgaactgcaaggctttgaatacccctatccgctcaagcatttcgagtttcagtcccaaggcgaatccctgcaaatgggctacatggacgtgccggccaatggcaagcccaacggccgcagcgtggtgctgatgcacggcaagaacttctgcggcgccacttgggaaggctcgatcaaggccctgagtgacgccggctaccgcgtgatcgcaccggaccagatcggcttctgcagttccagcaagcccgatcattaccagtacagcttccagcaactggcgctcaatacccaccaactgttggaaacgctcggtattcagaaggccacccttatcggccattccaccggcggcatgcttgccacgcgttacgccctgatgtaccccgcgcaaaccgaacagttggcgctggtcaaccctatcgggctggaagactggaaagcgctgggcgtgccctcgctgagcgtcgaccagtggtatgcccgtgaactgaacgtcagcgccgagggcatccgcaagtaccaactcaatacctactacgtcgggcgctggaagccggagtacgagcgctgggtagacatgtacgccggcctcagcaacggccccgggcatacgcgggtcgcatggaactcggcgctgatttacgacatgatcttcacccagccggtgtactacgagttcaaggacctgaagatgccgacgctgctgctgatcggcacatcggacaacaccgccatcggcaaggacgtcgcgccaccagccgtcaaagccaagctcggcaactatgccgtgctgggtaaacaggtggccaagctgatcccccgcgctaccctggtggaattcccgggcctggggcatgcgccgcagatggaagaaccggagcagttccacaaaacgctgttgcaggggctgaatgccctttaatccaaactttttcgaggcactcgtgaatgtcggtacagattgcagtcattgatgattggcagaatgtggccagtggcgtggtggattggtcagtccttgaagcggtgggccaagtgcacttcctgcacgactacccggcggataccgccacgatgatcgagcgtttgcgggagttcgaggtgatttgcgtgatgcgcgagcgctccagcttcgacaaggccctgctgcaaggtctgcccaagctcaaattgctggtgaccggcggcatgcgcaacgccgccatcgacattcccgccgccaagaccctgggcatccaggtctgcggcaccgacagctataaacacgcagcccccgagctgacctgggcgttgatcatggcctccacccgcaatctggtggccgaagccaactcgttgcgtgccggcgactggcaggtggggctcggcggcgacctgcacggcaagaccctggggattctcggcctgggcagcattggccagaaggtcgcgcaatttgcccaggtgttcggcatgcgcgtgattgcctggagcgaaaacctcacgccggaacgggcagtcgaggttggtgtgacgtgggtcagcaagcaagcgctgtttgaacaggccgacattctcaccgtgcacctggtactcagcgagcgcagccgtgggctggtggatgcccaggcgctgggctggatgaaacccggcgcgcgcctggtcaacaccgcacgcgggccgattgtggatgagcaggcactggtgcaggccctggaaagcggccgcctgggcggggcggcgctggatgtgtatgccgaggagccattgccggcggatcacccgttccgcaggttaccgaatgtgctggccaccccgcacgtgggctatgtgagcgagcagaattaccggcagttctattcacagatgatcgaagacattcaagcctgggccaaaggagcgcccattcgcgtgctgggctgacgcaccatcccagggcgctccgcacaagcgcggcgcccacccgaccttgtagtgagcaggcttgccctgcgctggggcgcgcagcggccctgaatatcggttcaatcttcgaaagtcccggttgggagcgcttcgcactccagcgcagggcaagcctgctcaccacagggtccgctccaccctggcatatggttacaatttttttgtcctacaaaatcttcctagaaaccctacaggctctgggatctgtcctagactcatgaccgatgggtccgttccaaaacaaaaaccccgcagaaaatctaaacttttcaactcggccattggtcaagttttaaggtacgacgagcgcacacggttccagcccgatgcccgtccatccaatctatatctgccaaccgtgcaactggcataagccttgccagatctgtacagcgcttgtgcgcgtggccgcaggatgcggtcgacggagttaatggcagccggccattagccgaccaacacgtggagagaactatgatcagtgccgcagcaagtattcagggagagcgtgttagtcagaccgttggcggggcaaccgcgttggctgacctcaccacggtgcggccggttcccacctacaaccccaaccgcaagaaagtcctgtttgtgacctccgagttcgccgacctggtgaagaccggcggcctgggcgacgtctccgccgccctgccccgcgccatggcccacctgcacgatgtgcgggtgctgatccccggttatccgcaggtgatggaaagcgacaacccgatccatatcatcggtgagctgggtggccacgccgcgctgccgccgtgcaagatcggacgcatggacctcaaggatggcctggtcatctatgtactgatctgccccgagctctacgagcgcgaaggcacgccgtacggcgccaacaacggccgcgactggccggacaaccatattcgcttcgcccgcctgggcctggccgccgccgacatggccgccaacctggcgcagatccactggtgcccggacctggtgcacgcccacgactggcccgccggcctggccccggcatacatgcactggcgtgggtcacgcacgccaaccctgttcaccattcataacctggcctatcaaggcgtgatcagcctggcgtcgacgccagagctgggcattccaccccacgccctgcaacaggaaggcatggagttctacggcaagatgtcgttcctcaaggccggcatggcgtattccagccacatcaccacagtgagcgccacctacgcccgggaaatcaccacacccgagttcggctgcggcctcgatggcttcctggccagcaagacccagcaagggttgctcagcggtattcccaacggcatcgaagacagttgggaaacctccaccgacccgcacctgacgcacaacttcaacattggcgactgggacggcaaggcggtcaacgccgcccaggtacgcaacctgttcggcctgcatgattcgagcggcccgctgttcgccgtggtgtcacgtctggtgttccagaaaggcctggaccttaccgaagcggtggccagctttatcgtcgagcaaggtgggcagatcgccattatcggtcgcggcgagccggaagaagaaaacgccatgcgtgaactggcgctgcgctttcccggccagatcggtgtgcgcatcggcttcaacgagaccgatgcgcgccgcatgttcgccggcagcgatttcctgctgatgccgtcgcgctacgagccctgcggcctgagccagatgtacgcccagcgcttcggctcgctgcccgtcgcccgcaacaccggcggcctggccgacaccatcgaaaacggcgtgaccggctttctgttcaatgaatccacggtcgacagttacaaagaagccttgagccgcgcgttcaaggtgtttgccttccctggcctgctcaatgccatgcgcagccgggcgatgacccaaccgttcaactggagccaggcggtggaaccctacgccgaactgtacgagcagctggtggctaaagcactggggaaatccgctaaataatcaacgggaggtctctatagatgccgttacggactctggaaacctggccccacggcgcaatcatgctggacgcgcaacacacgcgtttcgccttgtgggcgccagacgcattttatgtcagcgttgaattggaacacggcaagtccatcgccatgctgccccaggcagatggctggttcgaaaccgaaatagcgtgcccggcgggcacgcgctaccgcttcaatatcgatggggaaatggatgtacccgaccccgcgtcccgcgcccaggccgccgatgtgcacggctggagcgtggtggtcgactccctcgcttatcactggcgccacagcacctggcaaggccgcccctggcacgaggcggtcatctatgaactgcatgtcggcgccatgggcggttatgccgccatcgaaaagcacttgccacgcctggccgagctgggggttaccgcaattgaactgatgccgctggcgcaattccccggtgatcgcaactggggctatgacggggtcctgccctacgcgccccaagcttcctacggcacgcccgaacagctcaagcacctgatcgacagcgcccatgagcacggcctggcggtgatcctcgacgtggtctacaaccacttcggcccggacggcaactacctgggccagtacgccaagggtttcttccaggaagacgtgcacacgccctggggcgccggcatcgatttcaatcggcgcgaggtgcgcgactttttcctggataacgccttgatgtggttgctcgaataccgcttcgacggcctgcgcctggacgccgtccacgccatcgacaacccggactttctcaaggaactggcacaccgcgtgcgcgagcaggtggataccggccggcacgtctggctgatgctggaaaacgaactcaaccaggccagcctcctgcaacaggatttcgacgcgcaatggaacgatgacttccataacgtcctgcatgtgctgctgaccggcgaaaccgacgcctattacagcgacttcgccaaggagcccacggccaaactggcgcgctgcctgggcgaaggttttatttatcaggggcacaccacccggcacgggcatgagcgtggcgaacccagtgggcatctgccgccgagcgcgtttgtggcgttcctgcagaaccatgatcagatcggcaaccgcgccctgggcgagcgcctgcatcaactgtgctcgccacaggcactgagggcggcgaccgcactgctgttgctctctccgatgatcccgctgatgttcatgggcgatgagtcgaatgcccgcgagccgttcctgtttttcaccgatcaccatggcgaactggcagaagcggtgcgcgaaggccgccgcaatgagttcaaggatttcgccgcgttccaggacccggaacgacgcgagcgcatccccgacccgaatgccctgccgacctttttgcagaccacgccgaacttcgacgacaacgaacacacccagctgtatcgccagttactcagcctgcgccaccgtcatatcgtgccgcacttacccggcagtatggccctgggcgccgaggtcttggccgaaggcgccgtgagcgcccgttggcgcctgggcgatggcagcctgttgcagattgacctcaacctgagtgccacgccgctggatcagccggcgacggcgcctgtcctgtttgaaacgcctgccagtaccggcgcacacctgccgccgtacagcgcacgcgtcaccctatcccctgttggagagcacccttgagcgaagcgaacctggaaatcctcgccagccgagcgggcctggccgtcgattggatcgacgcaaacggccgcccgcaacaagtgaaacccaacgccctgcgcgccgtcctcaaaggcctgggccaccccgccgacaccgatgccgaggtcaacgccagcctgctggccctggaacaggtgcaacaagacaaacacctgccgcccctgctgaccatcgacagcggcgcaggcctcgacctggcgcgctacttcgaaccggacaccctgtgccgggtcagccttgaagacggtgaaaccctggagttgcgcctcgatggcgacgcggtcctgcccggcgtcatcgccctcggctaccaccaagtgcacattgccgaccagaccttcaccctggccgtcgcccccacccactgctacagcgtcgccgaagcggtcgacaaccgccctgcccgcgcctggggcctcagcgcgcaactgtacagcttgcgccgcctgggcgatggcggcttcggcgacaccctggccctggagcacctggcccgctcggcggccgagcgcggcgccgacgccctggcgatcagcccgatgcatgcgatgttcagcgccgacaccgcgcgttacagcccgtactcgccctccagccgcttgttcctcaacagcctctacgcgtcgccgggttgcatcctgggtgagcgcgaagtgcgcaacgccatcgaggccagcggcctggcggatgaactgcacgacctggagcaacacagcctgatcgactggcccactgccgccaacgccaaacagcgcctgctgcgtgcgctgtatgaagacttccgccatggccaccacccgcaacacgccgacttccagagtttccgccaggccggcggtgaggccctggaaaaccactgccgtttcgaagccgtgcaagcgacccgcgccgctgccggtgaagacctcgactggcgccactggccagaagactggcgcacgccgcagagcccggcattggcgcggttcgccgaagaccaccgtgacgagatcggctacttcgccttctgccaatggctgatcgcccgttgcctggagcgcgcgcaacaagccgcacgcggcagcggcatgggcgtcggcctgattgccgacctggcggtgggcgccgacggcggcggcagccaggcctggagccgccaggatgaattgctcgccgacttgaccgtgggcgcgccgcccgacatcctcaaccgcgccggccagggctggggcatttccgcgttctcccccgaaggcctcaagcgccacggttttcgcgccttcatcgaaatgctgcgcgccaacttcgcccacgccggcggtttgcgcatcgaccacgtgatgggcctgcaacgcctgtgggtgatccccatggacgcctcgccgcgtgacggcgcgtacctgtattacccggtggacgacctgctgcgcctgctggccctggaatcccaccgccaccaggccatcgtgctcggtgaagacctgggcaccgtgccggacggcctgcgcgaaaaactcatcgcccgctcgatcctgggcatgcgcgtgttgctgttcgaacagaaccacgaaggccagttcaagccgatcctcgactggccggacaacgccctggccaccaccagtacccacgacttgccgaccctcaacggttggtggcacagccgtgatatcgaatggaacacccagctcggcctgatcgatgcgcccaccgtggagcaatggagcgagcaccgcctgcgcgaacgccaggcactgcgccaggccttgagccaggacccgcagaacttcgtcgaagagatccgcaatgaaaccgaccacatgatcgacgccagcgtacgctacctcggccacacccgcgccccgctggtgctgctgccgctggaggacgccctgggcgttgaggaacaagccaacctgcccggcaccaccgacacccaccccaactggcgccgtcgcctgccgggtgaggcgtctagcctgctcgacaatgccggcgccgcccgccgcctcgaactgttggccgtcgcgcgcaaccaagcctatgagcgtgaccgatgaaagccctgcccctgcgcgccacccagcgcctgcaattccataaaggttttaccctcgatgacgcggtgccgctggtgccgtatttcgcccggctgggcatcagtcacctgtatgcctcgccgctgctcagcgcccgcgccggttccatgcacggctacgatgtggtcgaccccaccacagtcaacccggaactcggcggcgagccggccctgcggcgtctggtcgcggcgttgcgtgaacacgacatgggcttgatcctcgatatcgtctccaaccacatggccgtcggcggtgccgataacccctggtggctggacctgttggaatggggccgcctgagcccctacagcgagttcttcgacattcagtggcactcgccggaccccttgctcaaaggccaattgctgatgccgttcctcggcagtgactacggcgaagccctgcagaccggcaccctgaccctgcacttcgatgccgaccacggcgcgttctacgtcgagcattacgaacaccgcttccccatctgccccaaggattacgccgcgatcctgggcaccgatgaatcgctcaagcccctggccgagcgcttcagcgccctcgcctaccaggacgacgcctaccacgaggccgcgtggctcaagcaagcgctggccgagcgcgccaccgaggtgctcccggcaatcgaacaacgtttgacggccttcgacgggcgtcagcccgagggcttcaaacgcctgcatcaattgctcgaacaacaggcctaccgcctggccagttggcgcacggcggcggacgatatcaactggcggcgcttcttcgatgtgaatgaactcggcggcctgcgcgtcgagcgcagcgctgttttcgaagccacccacggcaagatcttcgaactgatcggcgaaggcttggtggatggcttgcgcatcgaccatatcgacggcctggccgacccacgcggttattgccgcaaactgcggcgccgcgtggactcgctgtcgcctgagcggcacttgccgatcttcgtcgagaagatcctcggcgaaggcgaaaccctgcgcgacgactggcaggtggacggcaccaccggctacgagttcatgaaccagttgtcactgctgcaacatcacccggacggctttgcgccactggctgcgttgtggacccgtcacagcgaacggcctgcggcgtttatcgaagaagcgcaattggcccgccagcagatcctcaacggctccctcggcggcgacttcgaaagcgtggcccaggccctgctgcaagtggcccgcgacgatgtgatgacccgcgacctgaccctcggcgccatccgccgggccttgcaggaactgattgtgcatttcccggtgtaccgcacctatatcagcgcccgtggccgcagtgccgccgacgacaggctgttccagcaggccatggacggcgcccgcacgaccctgggcgaaggcgactggccggtgctcgaccacctggccaactggctgggtggccagccgtggcgcaatcgcccggtgggccgtgaacgcaagatcctcaagcacgcctgcgtgcgcttccagcaactcacttcgcccgccgccgccaaggccgtggaagacaccgcgttctatcgctcggcggtattgctgtcgcgcaacgacgtgggcttcagcaccgagcagttcagcgcgcctttggccgacttccatggggtcaaccagcaacgcctgcagagctttcccgacaacctgctggccaccgccacccacgaccacaagcgcggcgaagacacccgcgcgcgcctggcggtattgagtgaatgtgcgccctggtacgtcgagcaggtcgagcagtggcgcgccctcgccgcaccgctgaaggcggaggcaaacacgccatcggcgggcgacgagttgatcctctatcaggtgctgctgggcagttggcccctggaccagaccgacgacttcgagggctaccggcaacgcctgtggcagtggcagcaaaaagctctgcgtgaagccaagttgcaaagcagctggagcgcgcccaacgaagcgtatgaacaaggcgtcgaagccttcctgtcgcggctgctgctcagcgatgaaggccacacgttacgcactgccatcggcgccgctgcccaggccatcgcgccggccggtgcgctcaatggcctggcgcaatccttgcttcgcatgacggtgccgggtgtaccggacctgtaccagggcgatgagttctgggacttcagcctggtcgacccggacaaccgccgtccagtggatttcaacgcccggcaacaggcactggataccccaccggacatcggcgaactgttgttcaactggcgcgacgggcgtgtcaaacaggcgttgattgcccaggtgctgggcttgcgcaaggcctgtcccgagctgttccgcaacggcacctacacaccgctgcaagtgcacggcaaacacgccgaacgggtggtcgcgttcgcgcgtgaataccagggcaaacacctgctggtggtggtaccgaggtggccgcaggacctgcttgaaaacggtgtgcatccaatgatcaatgcgcaggtttggggcgatacgcgggtgaaattaccgttcgccgcgtcaaccaaaaactggaagggactttttcatacaggcgcagtcacaccagacaaggagctgttgatcagcactgccctgggggatttcccggtcaatgtctttatcaatcctgatgatcaagaaagctgaaaattctctgtgaggagcattgcgatgagtactgacgaaaaacgcataaaagagttggcgcaccagatctgggagtccgaaggcaagccccatgggcaagacgcgcggcactgggagatggcgcgcaaactggccgaagccgaagcgctgacgccgagcaaacccaaggcccccgccaagcccaagccaccggtcaaagccaagccggccgcgagcaagccggcgccaccggccgctaaaaaaccacccgccgcgaagaaacccaagccttaatcccccacctcttgtcggcgctgtcggcaagaggtgattccacctaccagactctcagctgaaatttcgtcggcacggccgcgttcggcctgaagaaagacccttgcaggagcaactcaatgagcaaacccgataaaaccccatcgacgccgggcaacgaaccgtcgcgaatccgtgaaggtttgcccttcccgctcggcgccacctgggatgggctgggcgtcaacttcgccctgttctcggccaacgcgaccaaggtcgagctgtgcctgttcgacgacaccggcgaggtcgagctggaacgtatcgaactccccgaatacaccgacgagaccttccacggctacctgcccgatgcccatcccgggctgatctacggctaccgcgtgtacggtgcgtacgacccggccaacggccaccgcttcaaccacaacaaattgctgatcgacccctacgccaagcaactggtgggcgaactcaaatggtcggaggcgctgttcggctacaccatcggccacccggacgacgacctcagcttcgacgaacgcgacagtgcgcccttcgtgcccaagtgcaaggtgatcgacccggcgcacacctggggcaacgaccaaccggtacgcgtgccgtgggaccgtacgatcatctacgaaacccacctgcgcggcatcagcatgcgccacccgtccgtgggtgaagctgtgcgcggcacctgcgccgggctgatggaagacgacgtgctcaaacacattcgtcagttgggcgtgtcgtcggtggagctgctgccggtgcatgcgttcgtcaatgaccagcacctgctgcaaaaaggcatgaccaactattggggctacaacagcatcgcgttttttgcccccgacccacgctacctggccagcggcaagatcgccgagttcaaggagatggtcgcgcacctgcatgagcagaagctcgaagtgatcctcgacgtggtctacaaccacaccgccgaaggcaacgagcgcggcccgaccctgtccatgcgcggcatcgacaacgcctcgtactaccgcctgatgccggacgacaagcgtttctacatcaacgactccggcaccggtaacaccctggacctgagccacccctgcgtgctgcagatggtcactgactcgctgcgttactgggcgacagagatgcacgtcgacggcttccgcttcgacctggcgacgattcttggccgctaccgcgatggtttcgacgaacgccacagcttcctcgtcgcctgtcgccaggacccggtgctgcgccagttgaaaatgatcgccgaaccctgggactgcggccccggcggctatcaggtgggcaacttcccgccgggctgggtggaatggaatgaccgcttccgcgacaccgtgcgtgccttctggaaaggcgatgacggccaattggccgacttcgcggcacgcatgaccgcctccggcgagatgttcaaccatcgtgggcgccgtccctacagctcggtgaacttcatcaccgcgcatgatggtttcacgctgcatgacctggtgtcgtacaacgacaagcacaacgaagccaacgacgaaaacaatcaggacggcagcaacaacaacctgtcctggaaccacggtgtcgaaggcccgaccgacgacccgcaaatcaacgccctgcgcctgcgtcagatgcgcaacttcttcgccacattgctcctgtcccaaggcacaccgatgctggtggccggcgatgaatttgcgcgcacccagcacggcaacaacaacgcctactgccaggacagtgagatcggctggatcaactgggacctggacgaagacggcaaggccctgctcaaatttgtgaagcgtttgatcaagctgcgcctggcctacccgatcctgcgtcgtggacgcttcctggtgggcgactacaacgaagacatcggcgtgaaggatgtcacctggctcgcgccggatggcaacgagatgaccaccgaacagtggcaggacagccacggtcgctgcctgggcatgttgatggatggccgcgcccaggaaaccgggattcgccgtcccggcgccgacgctaccttgctgctggtggtcaacgcccatcacgacatggtcaacttccgcttgccgccggtgcccgaaggtgagttctggacctgcatgctcgacaccaacgagcccgccgtacgcggccaggaacgctttgagttcgatcacgagtacgccgtgaccggccgttcgctgttgcttttcgagctgcagcgcgaagacgaggtgtgagatggctctgcatggattccttcaaggcttccggggctatgcggacacgcaagccctgggcgacgccctgaaggcgcttcaggaagaaggcctggaccacctaccgctgcccggcggcggtcagaccctggcgcggttcagtcgcctggcgcaggtggcgggtcatgacctgcgcctgtgcaagctgttcgaaggccacaccgatgccctggcaatcattgccgagctcaactccccactgccgcccttgggcagcacgtggggcatgtgggccgccgagccgccaacggccaaggtgcgcgtgcaccaggagggccatcgcctgcgggtgcaaggccgcaaggcctggtgctccggcgcggcggtggtgagccatgggttgttgaccgcctgggacgaagacgatcgccagcagttggtggccgtgcacatggatcaacccggcatcgtggtcagcgatgaggggtggaacgccgtgggcatggcagccaccggcagtgtggaggtcgtgttcgacggtgcctgggggctggcggtgggcgggccgggagattacctcgcccgcccagggttctggcaaggcggtatcggtatcgccgcctgctggtacggcgccgcgcagcgcctggctgaggtcttgcgcgcgcagtgcagtaaacgcccggaaccccacgccctggctcatctaggcgccgtcgacagcgcactgaacagcgccgcctgtgtgctgcgtgccagcgcggcacagatcgaccttgagcccaaggctgatgcccggcaattggcccagcagacgcgggcctgtatcgaagacaccgttgagcaggtgctgcgccacgtcgggcgcgccgtcggtgcgggtccctactgcaaggacccgcactttgcccagttgatggcagacctgccggtgtatgtacgccagagtcatgccgaacgcgacctggccgggctcggagagctggtggccggtgaacccacagggaggtggcagttatgagatccaatccgatcgttggccagggcacgccgctgcatcactggcaggcctcgccgaaaatggccgacttgccgtcgatcagcgtcgagcagttggtgcccgccggccaccgtgcggtgatcattgcaccgcatccggacgatgaaatcctcggctgcggcggcctgatgcagggcctggcggcgctgggtcggccgatccaattgatttcggtgaccgatggcagcgccagccaccccggctcgcagcgctggccagtggagcgtttgagcgtggtgcgcccgcaggaatcggcccaggccctgcaccgcctggggttgccgctgcacagtttgaaatggctgcgcgccggttttaccgacagccaggtggcggcacgcgaagctgacctcgtggcgtttatccaacgctacctcaagtctaccgacgtggtgttcaccacctggcgcgaagacggccattgcgaccatgaggccgtggggcgtgccagcgcccaggcctgcgcggcggtcggcgccaccctgtatgagctgccggtgtggacctggcattgggcaacacccgaagacagcgtggtgccctggcaccgtgcacgcaagatcccgctgacctgtgaggccgtcgctcgcaaacggcatgccatccacgccttcgccagccaactggaaggcgacccgcagatcggcctcgcgccggtgctggcgccctacgtggtggagcgtctgttgcaaccctttgaagtggtattcgtatgagtgtggccacgccttatttcgaccagctgttcgccaataacgatgatccctgggcctttcgccaacgctggtatgagcggcgcaaacgcgcactgaccctggcgatcctcacgcggccacgctacgcctcggtgttcgaacccggttgcgccaatggcgagctgagtttcgaactggcaccgcgttgtgaccgcctgctgtgctgcgacaccgccgcggccgccgttgacctggcgcgcactcgcttgctggggttcccccaggctcaggtgcagcagtgccgcttgcccgaacagtggcctgcgggccagttcgagctgatcgtattgagtgagtggtgctactacctcgacgccgatgacctgggccaattgatcgatcacgcccgcaccgcactgaccgccgacggccaattgctggcctgccactggcgcgcgcctatcgacggttgcccgcaaacggctgagcaagtgcacgccctgctccagcaacgcctggacatgccccgcatcgccagccaccacgaacctgatttcctgctcgacctgtggagccgcgacggcacctcggtcgccacccttgagggcctgcgatgatcggcattctgatcccggtacataacgaagaggcgttgctcggcgactgcctgaaagctgcgatgatcgcggccagccatcccgggttgctcggcgaagcggtgactattctggtggtgctcgacagctgcagcgatgccagcgccgccattgcccaggcctacccggtgcagtgcctggaagcccaggtacgcaacgtggggcatgtgcgtggcgtgggtgcgcggcatttgctcaatcagggcgcacgctggatctcctgcaccgatgctgacagccgggtggcccccgactggttggtggcccaattggcgttgggcgtggacgccgtgtgcggcaccgtcacggtggatgcgtggagcgagggttttgatcccgccgcgcagattcgctacctccagggctacgaggctcgcgacggtcatcggcatatccacggggccaacctgggggtgagcgctggcgcgtacgtgcgtgccggtggtttcgagccgctggcgtgccacgaggatgtgcaattggtgcgcaacctggagctgtgcggcgcctccatcgcctggagccacggcccgcaggtgattaccagtgcgcgcctggacgcccgtgcacaagggggattcggcgattacttgaagagcctgatgcatgccacgtaaaaaaacgccgttaccgaatgtgaaaccgcgcaatccttgtctatgctgagaacgccttgctggcattccagggttggggtgccatgcagccactacggcggagcctgtggtggaaacaagagagtcgtcccgtcaacggggcacgaccccgcatcaaccgacaaggatgtgacaccccatgaagcttgcttccttaagcgacggccgccgcggccccgcgcaagtctggaacagcgccccgcagttggcgcaaatcccccccattacgccctcctcattagtgccgcctggcgcacgcgtggtgatcatcgcacctcatccgggcgatgaggtgctggcctgcggcggcttgctgcaattgctcagcacgctggaacacccgctgcagctgatctccatcaccgatggcagcgccagccacccgggctccaacgtctggccggcgagccgcttgagcgtggtccgcccccaggaaagcgccgaagccctgcgccgcctgggcatgccgctgcacagcctgaagtggattcgcggggggttttgcgacaacgccctcgccgcccgcgagccgcaactgagccaattcattgcgcgctacctgcagcccggcgatgtggtgttcagtacctggcgcaacgatggcaatgacgaccatgatgcggtgggccgtgccagtgccaaggcgtgcagcctggtgggcgcgcagctgcatgaactgccgatctgggcctggcactggccggcccgcgaaggcgcgatcatcccctggcaacgcgcgcgcaaggtacgcctggacacctggaccgtggcgcgcaaactccacgccgcccacgcctatgccagccagctggccggggacccacagatcggcctgccgccgatactggcccaggtgctgctggagagaatgcgcgaaccgtatgagatcgtgctgtcctgaaatccaactcgttcatacctgttaattctgacagtagcggcctggcgaatgtgtggctagggtggaaaaagcgctgcaccgcttcaggtgcagtcgagaaagccatgccaaccctttgcattggccggtgttttcagaaacggttaacccgctgtccctgctccgtatcgcgcatcacgttgtcatggtctggcccgcacctgccttcgcaggtgccgggacaactctcccctcaagtgaggacggatcatgcgcgcacggacactctcctggttgtacctgatcgtcatggcggtgtggccgccgggctcttatggcgcctgcaccatcaacagtggcgccggcgatgacacctccaactgtgacatcggcacggcgccgggctttaccgataacgcgggtaacaacacactgaatatcaccgcgacgggccgggtgaccggcaatgtgacctttggcgcgggcaatgatctggtggatgtgaatgggccaagcgccgggattgatgggaacctcaaccagggcgatggcgcgaatatctttcggctcaatctgggcagcattaccgggtctgtcactcaaggtgatggccaggacgtggcgcagattactggcggtcaagccggcgccgtgcgtcaaggagcgggagtcgacaacctttccatcagtggcgggactatcgcttcgctcgaacagggcgacggtctggataactttttcatgagtggcggtacgatcaccggtgcgtttgaagacggcgaccgagccaggatgagcggcggcaccatcggccgcgtcgacatgaaactcgataacaacctgttcgacatgtcgggaggccgcatcatcggcaacctggtgaccggcttaggcaacgacaccatccggatctcgggcacggcgtttgtgggcggcaatatcagtgtcagcgccggtgatgatcaggtgaccgtctcgggcggcgaggtgaacgggcagatcctgctcagtttcggcaacgaccacttcatctggaccggcggcaacctgcactcgtttgtgcggatgggtgaaggggacgacatggcactcgtgcagaatctgacgagtgctcagttggcggcagcgcaattggtggacggcggcctgggcaacgacaagctcaccctggacaacaccaaggccggggatccgggcctattgcccaactgggaagccatccagctggacaatggctccgaactgacgctgagcggtacgaccctcaagctgggtgacagcagctccggtactggcacgctggcgctggatggcacgagcaagctgctggtcgggaccggcgtcatcgaagcctttaccgccggccagttggttaccgtcagcaacagcggcgtgatcgacatgaccaccggcagctccagcaccagcgactcattgaccatcaggggcaattacaccggcaatggtgggcgggttgaactgcaaagtgtgttgggcggcgacggctcgcccagcgacaaactggtgattgaccaaggtgccattgggggcagtacaacgatcagcgtgaccaacctggggggtgcgggtgcagcgacgctgcaggatggtatccaggttgtgcaggcccttaatggtgcctccggcagtgccaacgccttcaccctcgccggcccggtctccgcgggtgcgttcgactaccgcctgttcaagggcggtgtaaccgcaggcacggcaaagaattattacctgcgctccactgtcccggtgcagccaccaggccctgagatcatcgtacctttaccgagcccgggcgagcctcccccccctaaaccagggcccgatccaatccccatctaccgcaaggaagtgccgatctatgccgcaatgttcccggcggccgaccagatcgtgcgcgccacgctgggcacttatcacgagcgcatgggcgaccagaaccttcgacagagcagccatgcgctggacggctggggccgggtctacggcagcagcagccgtcaagggttcgccggcacggtgagcccgacgctggacagcacgctcgagggcttccaagtgggcagtgatgtctacaccaccaccgacgacagcggacgcaaccagcgcgttgggctgtttgtgggccacagcacactcaaaggcaacgtcaagggcttcaacggtggctggcaagacctggacgccggcaaaaccaccttgcgcgccgatagcctggggatttactggacactgatcggggctaatcaagcgtatgtggatctggtgctgatgggcagccggttcaacggcaacaacgaatcagaccgcggcgtgaagatgaaaacccgagggcataacatcacagcctcagctgaagtcggctggccgctccgggccagccaaaactggacggtagaaccgcaggcccaagtgatcgtcggcaagacaaggctcgacagccagaacgatggcatttccgacgtcaagtatgacgccgataccagcgtgacctcccgcctgggcttaaggctgcgcggcgactacaacatccatggcatggcgtggcagccctatgcgcgcgcgaacgtctggcatgccagcgccggggacaacagtgtgatttacaaccacacgacccggatcgataccgagcagaaatccaccatccttgaagtcagcctgggcgccaccttgcaggtagcgcccgatgtgagcctgtatggcgaagtcggctacaaccgcaatctggacagcaacacctacaacggccgcgaaggcactgtgggtctgagggtggcgttctaggtttgtatcgcagtgtgtacacagcccactgcgatacacagcctttaactcggcgggtttcctgaaacaggccagatacagcccggcgttcaactgagcacccggcacacatccagccgcaggaggctcgccatgcagactcagttgaaccgccgttccacacccctttttctggcctttgccctggcgcaattcggcatcctgggcatggcccacgccgaaatgcccgaggctgcgaccaaagttgtcgccagtacccaaagcgccttcggtgccctcaagcacgtcaaggctgggctgctggacgtggcctacgccgaagtcggccccaccaccggcccggcggtgatcctgctgcatggctggccctacgacattgacagctacgcccaggtcgcgccgttactggcggccaagggctatcgcgtgttgatcccttacgcacggggttatggcgatacgcgtttcctatcggctaacaccccgcgcaacggccaaccggcggcgctggccagcgatgtgatcgacttcatggacgcgctgaagatccagcaagcggtgctcggtggctatgactggggcgcacgctcggcggacatcgtgtcggcattgtggccggagcgggtcaaggcgctggtgtcggtcagcggttacctcatcggtaaccaggcggccggcaagaacccactgccgcccaaggctgagttgcaatggtggtaccagttctacttcgccaccgagcgcggcgccgccggctaccagaaaaacacccacgacttcgccaagctgatctggcaactggcctcgccgcagtggaagttcgatgacgccacgttcgatcgcagcgccaaaggcctggagaacccggatcacgtagcgatcactgtgttcaactaccgctggcggttgggcctggtgcagggtgaaacgaaatacgacccgctggaacagagactcgcccaggcgccgtccattggcgtacccaccatcaccctcgaaggcgacgccaacggcgccccgcacccgcagccggaggactacgccaagcgctttaccggcaagtacgagttccggctgatcaacggtggcgtcggccacaacctgccgcaggaagcgcccgaggcgtttgccaaggcggtcatcgatgcggatcacctgtgatgaagcgcctgtgcatggccgcattggccctcgcgagttcggctggcaccttcgccgacagcgccccctcgccgatctacggcgtgactattcccgacggctaccgccaatgggaactggtggctccggcccaggaagccgacccgttgaacgagctgcgcgtggtgctgggcaacagcgctgcgctcaaggcttatcgggagggcacgttgcctttcccggatggcaccgtcctggccaagttggcgtggaaacacgagcagtcaccggatttcaagaccgcgtccatccctggcgcggcgaccacggtgcagttcatggtcaaggactcgaaaaaatacgcgtccaccggtggctgggggtttggacgcttcatcaatggcaaaccagccgatgaagcgcagcaccagacgtgttttgcctgccaccaggcgttggtgaaagaccgggattatgtcttcaccaggctggcaccctgaaagccagcccgttcaaggtctctggtcagaactggcgacaaataccctgtggcgagcgggcttgttgtggtgagcgggcttgccccgcgctgggctgcgaagcagccccaacaccggcagccgaagagtacctgattcaccgcatgcctccttccagggtcgcttcgcaacccaacgcggggcaagcccgctcaccacaaatgggagggtatcagccagatatggccggtttttcaaagactttgaaagggctgaccctgaaagcgcgaaaactgataggcgattcccagccagatgaaccaggccggcatcacgcacagtgccaggcgtgtatcagggcgcaacgccagcaggcccagcacaaaggcgagaaacgccagggcaaaccaggccattggcacaccaccaggcatcttgtaggtggattgggcgtgcaggtccgggcgttttttgcggtaggcgatgtaggacgcgaggatggtcgaccaggtgaagatcaccaggatcgccgacaccgtcgacacgatggtgaaggcggtcatcacctccggcaccacaaacagcaacaccagccccagcaacatcagcaagctggtaaacgccaggctgataaacggcacgctgctgttcgacaagcgccggaagatccccggcgcatcacccaggtcggccaaaccgaacaacatgcggctggcggaaaacaccccgctgttggcagacgacgccgccgaggtcagcaccacgaaattcacgatgcccgctgcggcggggaaaccggcgaccaggaacaattcgacaaacgggctcttgctcggtgacacctgctgccaggaggtcaccgcgataatgcacgccagggccagcacgtagaacaggatgatgcgcagcgggatcgagttgatcgccttgggcaaggtcttttccggcgcacgggtttcggcggcggcggtaccgatcagctcggtgccggcgaaggaaaagatcgccatctggaacccggcaaaaaagccgaacaggccgttgggaaatgccgcttgtttatccaggaggtggctcaacgaagcggtgacgccggtgggcgaaacgaaggaactggcgatcagcaccccactcaccccgatcaaggtcacaacggcgatgatcttgatgatcgcgaaccagaactccacttcgccgaacagcctgaccgtcagcacattcagcgcgaacagggtcagcaacatcgccaccgccggcatccaggccggtacatcggggaaccagtactggaagaaaccgccgaccacaacggcgtcgcccaccaccgctacgctccagctcaaccagtacgaccagccgagaaagaacgccgcacgcggccccaggtaagcaccggcaaagtcggcgaagctcttgaagttgaggttggacagcagcagctcgcccatggcgcgcatcacgaagtacacgaacagcccgatgatcatgtagatcaggatgatcgaggtgccggacagcgcgatgatcttgccggagcccatgaacaggccggtgccgatcgcgccgcccatggccatcaactggatgtggcggttgctcagggtacgttgcaacgcaggctgttcacacagcccgggcgtggttgttttcatcacaaaacctcttgttatgtttttgagttttggcagaagaaaagtcgaggggtcgttgttattggctgtggcgttcgaaaccgtgcagcacgttgaccgcattgatgccgatctcatcaaccatgtagccgccttccatcacgaacagcgtgggcacgccgacggtggcgatgatctcgcccatgccgaggaagtcttcgctgtcgaggaggaagtggctgatggggtcgtccttgaaggtgtcaacgcccagggagatcaccaacacttcaggcgcaaagcggcgcagttgctggcaggcgtctatcagggcggttcggtaatgggtccaggtggtgtttttcggcaacgggtagttcaggttgaagccctcccccgcaccgacgccgcgctcgctgccggcaccggaaaaatacgggtaagacaccgtcgggtcgccatgcagggaaatgaacatcacgtccgggcggtcatagaaaatattctgggtgccattgccatggtgaaaatccacatccagcaccgccacacgcgtggcgccctgggtgatggcgtgctgtgcggcaatcgcggcgttgttgaggtagcagtaaccgcccatgtattcacgggccgcgtgatggcccggtgggcggcacagggcaaaggcgctgtgatggccttcgtcgagcaacgccaggccggtcagtgcgatgtcggcgctggtcttcaccgcctgccaggtggtgcgggtaatcggcgaaccggcgtccatcgcgtaaaaaccgagcttgccgtcgatgaacgccggcacctgctggttggccaggtcgcgtaccggccacaccagaggcaaggcgtcatggctgcggccgatggcagtccattcggcccaggcggtttcgaggaacgccacgtagcgttcgctgtgggcggcgacgtagcaggcccggtcaaaacggcgcggcgtgatgatatcgcccagcccaacctgacggacccgatcacgcacggtgtcggcgcggctgggttgttcgaacgagggtttgagcacaccgtccttgagttcggtgccatggtgcaaacggtgggcttcgctgaaaacagtcaacatgtgagggcatccgccagtaaaagacagggtctattttgttctggcggcagtgggctttctttgcttttacttacggcactgttaggtttatcgggaatatttacctcattggcgcacgattatgaaaaataaaaccaaacaggtcgttcttgatgataccgatctcgccatcctcgccctgctgcagcaggacgccagtatttccaacgctcagctgagtgagcgcctgtccctgagcctcacgccctgctggcgccggcgcaaacgcctggaagaagaaggcgtgatcaaggactaccaggccaacctcgaccgcaagatgctcgggctggacatcctggcgttcgtgcatgtgcgttttgcgatccacaccgaccatgcgcccgacgccttcgaggcggtggtgaaagaactgccacaggtgttgtcgtgccacaagatcaccggggatgccgattatttgttgcaggtactggctgaagacctggacagctacagcgagtttgtcgagagcgtgttgcggcggcagttggggattgcctcgatacagtcgagcctggcgctgagggaggtcaaggcgaccagtcgagtggcgattccacagcgcgaataaccgcgcttttcgcggggcgatgtggcaaatcgccgccactgagatgtgaaaaattcgttaactgtttctccctcaaggctttttcctacaagaacaatctgccagactaatgcgaataattatcaacagattttttattcgccagggacggcgttcggggagagtcagttccatgtctgtgcaacaacacggcagtaaaggtttttcacccagtctgatagcgttggcggtctgtctggccagttcatccgcggtctttgccgccgatacccaggcgccggccaccacgcttgaactgggcgccacgcaaatctctggcgaagagcaactgggcgaaaccaccgagggcacccagtcctacaccactggcgcgatgaaaaccgcgaccaaactgccattgaccatgcgcgaaaccccgcaggccgtcaccgtgattacgcgtcagcgcatggatgaccaggcgatgaccagcatcaacgatgtggtcaaggccacgccggggttgttcctgaatttctccagcggtccgggccggcagtcctatacgtcgcgcggcttcgacatcgacaacctgatgtatgacggcatccccagtggctataacggtgtgtcagtgggcgcacagccgaacctggcgatgttcgaccgcgttgaaatcgtgcgcggcgccaccggcctggtcaccggcgcgggcaacccttccgccgccatcaacctggtccgcaagcggccactggacgagcagaaagtcaccctgaccggcgccgccggcagctgggacgactaccggggcgaactcgacgcctccagcccactcaacgacagcggcacctggcgcggtcgcgtggtcacctcgtaccgcgatgccaacagcttcatcgacaacgccgaggagtatcacggcctgttttacgccgtcaccgaagccgacctgagcgaagacaccaccctgacccttggcttctccaaccaaaaggacaagaccaattacttctggggctcgtcgatggtcggccaggatggccatcacctgaacctgccgcgctcctacaaccccggcaccgactgggaaaacaaggaccaggagatcaacaccgtattcgccgagctacgtcagcaactggccaacgactggaaactgcaagtcaacgccaactatgccgaacagaacgcgctgttctccggctcctaccagtcgcgctgggtcgccaacacactggcgcgcaccgtctatcaagcggcctacgatgaaaaccaggcgggtgtcgacgcgtttgccagcggccccttccaggcgttcgggcgtacccacgagctggtggtaggcgccagccggcgcatctacgacatgaccacccacaactacagcccctacaacctgaactggccgctcacggcgggcaaaccgaacttcgtccacaccaccaatgaccgcgacgtgaccacccaggacggggtgtacgtcaccacgcgcctgaatctggctgacccgttgaagctgatcctcggcgggcgcctggactggtatgactacgatgcccacggcagcaacaccggcgactacaaggtcacccgcaacctcacccgctacgccggcctgatctacgacctggacgaccatcactcggtctacgtcagctacagcgacatcttcacgccccagagcgaaaaggacacctccggcaccccgctcaagcctatcgtcggcaagaactatgaggtgggtatcaagggtgaatacctgggtggcgcgctgaacgcgagcgtggcgctgtttcgcgtcgaccaggaaaaccgtgccgtcggcgtgaccgtcgcaaactgcccgcaggcctcctgctccgtggcctccggcgagattcgcagccagggtatcgacttcgaactgcaaggcgccttgaccgagaactggcaggtcggcggtggctacacttatgcacgtacgcacaccatcaaggacgcagccaacccgcagaacgtcaacaagcagttcgacaccgacaccccggagcacctgttcaagctgaccaccaactaccacttccagggctcgctggaaaaactccgcgtgggcggcaacgtgtcctggcagagccgcatgtacaacgacttcaaagtcgcggatggcagcacctaccgcctgcagcaaggcgcctatgccgtcaccgacctgatggccggctaccaggtcaaccagcacctggacctgcagctcaacgccaacaacatcttcgaccgccgttactaccagtccatctccaattccgtgagctatggcggtgattcctatggcagcccgcgcaatatgatgctgacggcaaagtacagcttctgattcacggcggcgccctcctcaaagggcgtcgcacagcgaaccagaacccgaatgccgacctccgcgagcatgaaaatgcgctatgttatcgggctcataccttcaagattgataccatgcacatcacacgcttcgacatcctcccgtacctgacatccacccttggccttgaaaaaaacgagatgagcgacctgggctcgctcgtggtcctggtcggtgaaaatggttgcgggaagtcgcggctgctcgaggcggtcgactggctgctgcgtcgcacacaccaggttgggtacgctcaattgctcaagatcgacgcaggccgggcaaaacaaaagcgccactccgacgctatgctactgggagccgaagaccacatctcatgctcagccgctgcgtcggattgcgaagcgttcgataaggtacttgtgcctcttgactgtttgaacttcagcagtacgggcgacgaagacatcgatgtggcactgtccgcctattgcgcactgtccgacatactgcgcaacccgacgatttcaaaaggggggcacttcacgcgtctgtcggtcggcgcgccgcgcggcgatggcctgacggattcactacttgctggaactccactcgcttacatcgatgacgtctgcgtgcgtcaggctgcggcctcctccgacgaatcgatagggatgtacagcccaaaccgcatgattgaggacgactacgctcgcctgaaagaagtgctcaacgaaatcactggcatgcacttggatgtcattggcgaaaatgcctgcatcggcggtcagcgtattgatcgtacgacgttttctgacgggcagatggcgttgctgcgtattgcagtgctgatccattctcaggtgctgaaggacgttgaactgccgatcctgcttgatgagccggagcgtcatctgcacccttcgcgactcatcggactgatcgacgccctccgtaagcacctgccccgcgcacaattgtggattgcgacccacaatcttgcgctgacagcgcatctggcggccatagagccacgcgcaatctggttcggttcgaaggggctattcgagcgcgccggcctagcgcaggaaaaggtcatcaacggccttctgggaggggcaaccggcgcccaacagatcagcgatttctgcacgcgcgcggaccagttcgcggcatgctcgttctctgcggactgcctctatccacccgataccgtcacctataaaaaagatgatccgcaaatccagcagatccgcgacttcatcaccggagggcgtactcgtcccatggtcatcgtcgacattggtgccggacaggcgcgtttactcgacggtttggctcatttgctcaatgactctttgctaaaggacgtctcttactatgccatcgagccgaacgacgccacgcgggcattgtgtgctgaaagggtcagtcggcacttcaacgacgggagtgtacgcgtgttcgccagcgcaaaagatctcctcgcatccggccctatcaaagccgacgtcgcggtgctggcgaacgtgctgcacgagattgagctcaagtactggaaagcggtgttgctcgatgcgcacacgctcctgaaggacgatggatcgttgctcatcgtcgaggacacacggctgccgcgcggagagctggcccacccgcacggctttcttatcctcgagaccgacgccctgtgcgaactcttcgcaacctgcaaggacgcacacggcgttcagcacattgccgcgacacgcggtggcgcccgactacaagccaccgcgttcaaacgaccgctactggcggcgttgactacctcatccatccggagcgccttgcacctgcaaaaaagtagcgcggcagccagcattcgcgaattgcgtaagtctggccggcaacctgactaccgtctcggtcaagaacatgcctaccacacgcaactgcttgccaacctcacgctcgcccttgaagacttggcattaggtcgctgagccacaccgaaatgaacgcccgaatcctggagacgggcgttcaatgcacattaggatgaggcctgtacctcatctggcccaattcctgcctccctccatcccaccaagtcgctgctgactacgcggacgactcttttgagccccgccgcccaagcgcctgcgccgataatcggtcatcccccagctatcccgaggccttccccccatgacgagcccctccaccgaacaggtcagtccgcaaaccctgcgcaaggtcatcatcgccgccggcatcggtaatttcgtcgagtggtttgacttcgccgtctatggcttcctcgccactactatcgcccagcaattcttccccagcggtgatgccagtgcagccttgctcaagaccttcgccgtgtttgccgtggccttcgccttccggcccctgggcggtattttcttcggcatgctcggcgaccgcatcggccgcaagcgcaccctggccatgaccatcctgttgatggccgctgccaccacgttgatcggcctgctgcccacctacgccgccatcggcgtcacggcgccgattctgctgtcgctgatccgctgtgcccagggcttctccgccggcggtgaatacgccggcgcgtgtgcctatctgatggagcacgcccccagtgacaaacgcgcctggtatggcagctttgtaccggtgtcgacgttttccgcgttcgccgccgccgcggtagtggcgtatgcccttgaagcgtcgttgtccgccgaagccatgggcagttggggctggcgcctgccgttcctgatcgctgcgccactcggcctggtgggcctctacctgcgctggaagctggacgagacgcctgccttccaggccgtgaagcaagagcacgcagtggctcactcgccgctcaaggaaactctgcgcaaccatggtgcggcgatctgttgcctgggcgcttttgtgtcactgacggcgttgtcgttttatatgttcaccacctatttcgcgacgtacctgcaagtggcgggcgggctgaatcgggcgatggcgctgctggtgtcgctgatcgcgttgatcttcgcggcggcgatctgcccgctggcggggctgtattcggaccgggtcgggcggcgtgtcaccgtgatgactgcctgtgtgttgttgatcgtggtggtgtatccgtcgttcctgatggccagctccggctcgtttgcggcgtcgattgtcggcgtgatgttgctggcggtcggcgcggtgttgtgcggcgtggtcacggcagccttgctgtcggagacctttcccacacgcacgcgctacaccgcttcggcgatcacctacaacatggcatatacgatcttcggcggcactgcgccgctggtggcgacctggttgatcagcaccaccggcagcaacctgtcgccggcgttttacctgattgccgtggcgttgctggcactggccggagggttggcgttgccggagacgtcgcggatttccttgcacgacgtgggtggtgaggaaacaagcactgcacctttgctttcacggtaaacggcaggagggtgaacgccgctggacgcaggtagaatcaattagacacctgcctgctgccgcatccagaccatggacagcgttttctgaaggcgccgcagtgaaccctgtggtgcgcatcggctaaatcgccgcagccatgcgcgctctagaaccccaggcaaacgtcacgaccatcagcaaccccaagcccgccatcgccgcgccggccagggaaatcgccgggtagcccaaccctgcgttgatcactgcaccccccactgctgcgccaatcgcgttgccgaagttgaaggcgccgatgttcacggccgaggccaggttcggcgcatctttggccgcttccatcacacgcatctgcaacggcggcacgacggcgaagctggcgataccccagatgaggatgctcaccgctgccggtatcggccaacgcatcaggaatgcaaaggccagcaggaccagaatcagtgcgctcagcgagacgatcagggtccggtcgatcgagcgatctgccgccttgccaccccatatattgcccagggtcaacccgacgccgaacagcaccagcatggccgtgataaagggggtagacgcatgggtctggttgctcaggatcggcgcgatgtaggtaaacacggtgaacatggcaccggaacccaccacggtcagggccagtgccgccagtaccgaaccacgccccagcaccttgatttcggccagcacaccgtcgcttttcggcagcggcaggtcaggcagcgcgaaccacagcgcgaccatggtcaccaggcccagcccgccaatgccccagaacgctgtacgccagccaagcagttcacccaaccaggtcgccagtggcacgccaccaatagtcgccagggtcaggcccataaacatcgcggcgacggcgccggcgcgcttgtccggcgcaaccacactggccgcaacgatggaacccacaccaaaaaacgcgccgtggttgagcgaagtgatgacgcgggcaatcaacaggtcgtaatagccggttgcaagcgccgacatcacgttacccagggtgaaaatggccataagcccgaccagcaagtgacgacggggaatcttgccagtggtcaggatcatcagtggcgcaccgagcaatacccccagggcgtaggcgctgaccaacagccccgcagtgggaatcgaaacgccaaggtcattggcgatggtgggcaacatgcccatgggcgcgaactcagtgacgccaatgccaaaggcaccgacagccagggctacaaggggtggattgatacgcatggaagactcctcatttatgccgcaaatgctacgatcaacgctttaacggcactagaccgtttaattggcaatcacctttgcgcgcgaggcaaaaatggatttcaacggcaggtcgggtgagatggcggtattcgcaatggtggcgcaggaaggcagcctgtcggccgcagcgcgggcattacgcttgacgccctcggccgtcagccgcgtcatcgcacgcacagaacaacgcctgggcacccgcctgttgattcgcacgacccgcgccctcgccttcacagccgaaggcgaggcgtacctgcgcggcgcccggcgcatcctggccgacatggcggaagtcgaagaagccatcgccgaccagggcgcgcccaaaggccggctacgggtcagtgcggccctgggccacggccgcatggccatcgtgccgttggtggcggcgttcagcgcccgctacccaaacattgtggtggacctgaccttgggcgacgaagtggtcgatatcctcggcggccaggctgacatcgcgatccgctttggcgacctgccagacagcccgctgaccgcgcggcgcatcggcgacactggccaggtcctggtggcgtcgccggagtacctcgcgcaacacggtacacctctggaacccaacgacttgctgcgccacaactgcctgcgcttcaacttccgccgcgcccaatccgactggcccttcgcccgtgacggtagggagttttccctgaagataaacggcaatatcgaatgcagcagtggcgaagccctcgctcaactggcgcgattaggcgccggtattgcacgtatcggcgagttcacggttgcacaagacctgcaacgcggtgacctggtgcgcctgctggaatcctggaaccccggcgaccgggagccgatccacgtggtgtttgtcggcggcgcgagcatgccggcgcggatccgcgtgtttgtggactttttgctggagcatcaccggctataaacgcgcaggcttgtgcagccgctcaagcacctcgtcagctgcctcgcgccatgcctgcgtcgcgcctttgttcctcaacaccgccaacccagccgccgtaaaggtgcccggtgtcgcaatcgcgctacccaacgcttccagactcgcggatggctggtggcgggcactggccagacagtcttgcaggttgcccatcaccagttgggcggcctggtccttggacaggcctttgtcggtaaaccactgctgaagatcgctcaggaagaaatagaaccagccgttcatgcaggccgcaacagtggccagttcgaacgcctcttcctcgtccaatacaaccaatgaaccgagcgcgcccagcagcgttgcatggggttcgccaccgggcgtgaccaccacggtcgtctggttgatctgcgcggcgtaggacagcatggcgcgcaccacacgcgcttgcgggaagcggcgctgcaactcggccagcttcaatcctgccaccaacgacaccagcgattgctcaggtctgagctgcacttcattcgaaagctgatcgaccacctccgggcgcacgcccaggaccaacaagtccgccccatcgaccacctgttgattgtcagccatcacctcacagtcccactgttcagcgagttgctgcgcacgttggtggttacgcggagacagcagcacccgcccgccaaacccgctgcgccgcaggccgatcaccaccttttccgtcagctcaccgacgcccaggattccaatcttcagcacgctgtccactccggtcagttctgtagtcgggtgcatcatagacatgattcccgtcttcatgcaggcggacgttcacgctacactcgccgctcgaaaagatcagccaggaaggcaagcatgagcactcaaggtaaagaccggcaaatcgacaacatcgaattcaacgtcagcgatattgcccgcagcaaagccttctacggcggcgcgttcagttggacgtttgtcgactacggccccacctacacggggttcagcgatgggcgcctgacaggcgggttcaccacgggggagcctgttcggccaggtgggcctctggtcattttgtacgccgatgacctcaatgccacgcagcagcggcttaaagccctgggggctgtcattacccgcgagacgtttgcgtttcccggtggacgcagattccacttcacagacccggatggctatgaactggcagtttggaacgccggtcaataggcctcgacccgacgcctaggcgaaggcatcaatcgctctccctcaagccctaccctcacaggatatgaaggttacccatgcgttttctctttcccctggccctcagcctgacgcttatcggctgcgccaccactaaaaccgacgttcgcaacgaagcccaaatcagccaatacgacccggccaactcagcccgaatccggtttattacgggtgacaccaccaacgcgggtttcctcagcggccagacgtgcgagatgttttacaacaagtccctgctgacccaaacacccgaagaagccgggtggcaaaaagcccatgtcgactcggcggggctctacccgttcagggccactgacagccagaacagcgtgattggtatgcctgccagcaaggcgagcaaagccatcaaccaatcgcccaaagtgtttgacgagcatgtcattccagcgggtaaaccctttattgcagggttcgccatgggcggttcgcaaatgtcctgctttcccgcgcctgtcacgcttattcccgagcccggcaaagactatgaaatggaatttcagctggtcaaaatcagcacgttcaaggccggttgcgtgattgccgttcgccaactctctgttcaggacaacaacacggttgaaacaccgctaaggccgcaggtgtgtgccaaaacgccgtcgggttggtacaccgtcaccccgaaaccttcgccctgaaatgcctgggcaggacgccatagtcatcctgcttatcggacatcgcccagacctgggacccggcttgtattggaggaaaaatgcggatctacatcacaggtgcatcgtgcgcgggcgtcaccacactgggtcaccacctcgccacgcggctgggtatacgacgagtcgacgtcgatgacttttactggatgcccacaaacccgcctttcacaaccaagcgacctcccagcgaccgcgttgccctgatgcaacaagcactcggtgacgacgactgggtgctgagtggttcctgcatgatctggggcgatgcgttgatcgccgatgccgacctgattgtctttgtggtcacacccacgcccgttcgcctcgaacggttgacggcccgcgaaaaggcccgctttggcgatcggatcgcacccggtggtgatatgcatgcgatacacgtggccttccgggaatgggcttcgcactacgacgaccccgatttctcggggcgcaaccgtgggtggcatgaggagtggttatcacacatggcggccccgatcttacggatcgacggggctgacagtgttgaagcaatggttacggcagtcgttcattgggtatcgaaaatgtcgcaatagctggaaaccgtaacagacgaggcagctcaactgcctcgactgttctatttctatccgcccgtttcgcgatgccacaactgtcaattgtattttttgtagcatatatctatggcttgctgataaagcacctgacacgtgtcgtgggtgaataccccatttgaaatacaagcagagtgccgttgacttgcgcgatccgtacaaaccgacagaggcgttggtatatcggcgacttcctcagtaacgccatgtgattttgctgaattcacagggctcatagatttgttgagtgcttgaggtatctgttcaatcgtggggctttgaaagctactcgccaaaaagagaacgattgaagctgcttgccgcgcaggagaattggctggccaaagcttgaaatccaggagtacatcaccttgcttaagcgcgccatctttggtccaacgaataggtactcctgagccattttcgagggtacctttcgagtcgatgctaaccattggcgccccggctgagtcctccaaaatggacgtagcgcgcaagaccgccaacaaccttcctgaggtatcaacgactcgcccatcctggcttatcgttcccaaggctgttcgcacgtatttgaaaccttctgttttttcgtactcagtaatctccccttttttgtcgaccaatatgaaaaacataccgtgcttatctccaaccttgaaaggatggatctgaacgaccggtggggcgaacgatttgttatcgcaaccatgcgggccgggatcacactcaggaggtcttgcaaagcagaaaccacttgcaaacatcaacaagctcattgcgattgcggtgagcgttttcatgtgaaaattccttttaagcactgcgtaccggacgattaagtgtgttggccacgcggagaggtccagctttgccagacgcctcgttgtagtcgacaactcagctttacatcttcgataaggcgaattgaacaatagacgacgttggttgacgctgacgcgaatttttcatggtttcctatttcggtatatcgacgctgagagtctcaatctgcacacgtcaaccgcctgatacattgcgggcccaacgcaccggtcgtccaagcgtcgctactccccttatcctcacccctacccgcccccgcgaacccggagccgccatggacctcgccaccctcgcccttttcctccccgcctgcttcgccctgaacatggcgccgggcccgaacaatttgctctccgtgagcaattccacacgctacggctatcatctcctgtttggcgggcatcggccgcttgctggcctttgccggcatgatcgccctcgcatccgccgggttggcggtggtgctgcaaacgtcggagttgttgttctatgggatcaagattctgggggcggcgtatctgttttatctggcgtttcagttgtggcgggctaatccggaggcggaggcagattcggccacagagaaggtgggattgtgggcgttggcacgacaggagtttttggtgaccgcgggcaagcctcatgatcggtaatatgaaatctacacgcaggcatatatcggtcatttggtattaataaaagcagggatgaatctttggatattaaagagttttgcctcgctcatggattcgatatgagcaaatgtggggtagcgttgggcggtggtagtttcgaaatgactgagttgaaaatctcaccagtcgaatttctgaccttagcggaggatgattttgaacggggcggtttggcggctcttgtcaatgctacgaccaatgcaaaacgagctattgtctctcagcttgatcagttattgatctcttttggctatccttcatttcgattgaaggtgccaaagaagatcgaacggctaaaggcgctcgggttattggcgccaagtctgttgcgtaaagtcgtcgatatgcgaaatattcttgagcacgagtacacaacgcctgggcttaaaaatgttgaagaggcgttggatatcgcgagcctatttgtgatgtccgcttcagccatgttcattccattcgatgatgtcttggagttctcactccctgacctctttgtgacagagaacgctgtcactcacttttcggcgggactgaatcgtgagactgatagagttttctacactgtctacgcttataaatctggaagccatggacggagttgcgtcggtcagtgtgagattcaatcagggcatgtcctgttcgaggcgatggtgcagctttccgcgtcgctgatgcttcgctacaaggtgaaccaagctctcggcaattttgaagcggcgtatgcccagctataagtactcatttaattaatgttgtggctgtaaacggctgtaacccaccgaaaagggcgcgtccaagctggtggcatcaagcaacgttcaagcaaatctgctgatgggcaatatcacgtctcgtgaaagactcgatatctctacaaacccagcgaaattaaggtaagttcagaaaaccttttctcgaatctacggagcggataatggcgaatggaaacggagagttaagtcaggatttacacgcgcaaataaagaaattcagcggtgacggagatctgctggctgagtcaggccgctttgaagaagcgctagcccaatataacaatgcatgggcattgatcccctcccccaaaaatgattgggaggctgcaacctggatcctggcagctatcgctgacgcttgcttcctatctggatttaccacctcagcacgtgaggctttgcagtacgcaatgacgtgccctggtggtcttgggaacccttttttgcatctgcgccttggacaagttttacttgatgacgcacaaaatgaccgcgcagcagaagaactgatgcgtgcatacatgggggctggcccagagattttcgctgcagaggacgcccattacctgaactttctcaagacgcgtgctgatctttgacaataccgtaaccatgagctcctgcgtttacattcaagctactcagccccctaacgtgaatgcattgggtcgattaaagtcgtgcggtaggcaagccattcaagctagtcaccagcaagcccgataatgggcaatatgaaaccttctgtcaggctgctaccggccagaaccggttacctgtgcacgattgatgctctgtgtccgtcaacagcatctattcgatactaaccactctcgtagaatctaaatggccaccaaacgccctcaaatcaaaacctccgctgacattaacgagctgctgcttcactctaaggcgccgcggccactgacccctgagcagatggcggagctagagcgcatttcgaattacgatgtctctacctactcggagggagacgtccgagcggagatcattgaccccgtcatccgagtcctgggctatgccaaagagacctatttctccacgcagcgagaaaagcacctgaaggttggcgacggggacttgttcatcgactatcgaatgactttgtggtcgcaggccttttggatcatcgaagctaagaaggttaaacgcaagcagctgaaatttagctccgcagaactgcaacaggcacttctgtatgcggtgcatccggaaatcgacgctgctctcgttgtgctatgtgacggacgagtctttgaggtgtacgaccgcgatgagagtgtcacccagccagtcgcgcgcgtggaggtcaaaaagctaccggagcagttccacgtgcttcaggctctactcggtccgtggcaggcttggttcttccagaagcgccgcgcgctcaagctggccagccgtgtcctacagctggagatgacgcctggccgaattgaggagttttcggatgcaatgcagcggcgggtgcaggacgcgcgtgcgaaggtgtacgacaattggcgcaaggtaaagccctcaactgacaaagatgcgcgatggctcaactcgctggaacaggcatctatcggagatattgtcgcgaccgagttcttttcgggccagacagcgcaccgtctgggggttgtcgccaagtcgttggtggaaaaggcgaagccaggcgcgttcgaattgatgtacgcaatgtttccggaccatccaggaaacttgaacgacaactatgtggcacaggctttacgaactctcatcgagttcggcaagtcgggacgtgaggtcagttggatgcctgcttggcttggtgtccaacagcccggtgtcaatctggaggcgccgatcaagaaacttatcgcgctctcacttacgacctttctagctgcgccagatttcagggctgtacttcagttttcggcctgcgcgcgaaggctgtcgaaggtttcgatggcgctcaacccgacgttatcgaagttggggcatatccaacaccagcaggtgcgccatttttttgatgaactccactatgcgcagttcatgtcgacgcccgaagggcataacctccggcagctcgatgtgcgcgcatatctgctcaccgaacgattcgtccatgagtgcaccggcaagcagcagtttcgtggctgcttcaacctgaaccgggcacatacgctcctgattgactcatggaatgttgagcgtctgctgctcggcgacggcgccgactactggaggtgcctggacggcagaggaattgggggagaggttcatccgacggagcacaactgggtcgactacgactcgttgggtcacatcgcgctatgcgtgttgaaagacatccctgattggcgcgagtacgtacttgccaatcacggcgacgacgtccagcgaattgcggcctgcggttcgtgggcagctcgtgagattttggggattgcacgagatacgcagttaccgcatgtgccggatactgagagcgccaagcggttcttcgatggcgacgtctcgctcttcacggcgcttcgggacgcttactgcaatcgggggccggagagttgagtagcaaagcttcggccgtccccgctcctcttacaaccttccagttgccccccaaacccaatgacgcttatagtccgccccgtcgcccacatggcgatcaggtttggcgacctgactatcggatgcaaaagcactgcgctttttgtagaggctgttgcacgcctgcaaagctgtcttaatggcggctgtgcgcgggagaccttcgggtctgccgggttttccgataccggttcgccaacctgcgtacagctgtcaccctatcgtttggcgacgactgagtggcggtcaactactgcacttatcggagttttcaagatggaacgatacatccctctgactggaatcgatctggttcccgcctctttgctcattgattcagaagcgccgctcgatgtgctgcaagcgatggcggattaccgcatccgcaccgtgactcaagtactggaaaacattgcctttcgcagcgagttggaaacagattccgtagtgctttctgactttgcacaattgctggcaatccctttgcgtgacggctgcgacctgatggacatcatcggtcaacggctgcgcgccgaggtttcaacccccaaagaagcacctgcaagccagagctaagctgagccgcgcgcgttggtgtcgtcttagacccaacgcgcgcattgtccaaccgccccgctccccttatcctcacacctccccgcccccgcgaacccggagccgccatggacctcgccaccctcgcccttttcctccccgcctgcttcgccctgaacatggcgccgggcccgaacaacctgctgtccgtgagcaactccacccgctacggctaccgcacgtcatgcctggcgggcattggccgcctgctggccttcgccggcatgatcgccctcgcctccgcagggttggcagtggtgctgcaaacgtcggagttgttgttctacgggatcaagattctgggggcagcgtatctgttttatctggcgtttcagttgtggcgggctaatccggaagcggaggctgagtccgcgacggccaaggtgggattgtgggcgttggcgcggcaggagtttttggtggcagcgggtaatccgaaggcgatcttgatcttcaccgccttcctgccgcaattcgtggtgcccggggagccgatcaccccgcaattcgcgctgttgggcgcgatgttcctggtgctggagtggattgccatcagcgcctatgcctatatgggcctgcatatgcgccgctggtttgccgagccacggggcaagcggatcttcaatcgctgctgcgccgggttgttgtcggcggcggcgtcagtgttgttgatggcgcgcagggcttgaatggaagaaagctaattttgcaaatcgaatcttggctgcacgcacaagcatccacggtcttggagacctaaatatccgtttactaagtcgtgccagtaatattttacgcgccatgcattgcctaatgtattttaccttcctcagaaactgccagactgaaatcagtcaatataaaaagacttcccgacgagaacaaccatgagcaaaaatcatttcatcaagatgtttgaagcaaaatttaactatttatggagccttttcatcgccactgacacaataaagcataatggggaaaaagggagcctaagagaggcatttgtaaggcagattatagaatcacttctgccacaccacttcgccatagggagcggtatcatcaccgacttcaacggaaaagagagttcacaggcagacataataatttacgacaaaagattgatcccacccatattccaagatatcggccgtggaatttacccaattgattccgtactaagggtcttggaaataaagagcaacctagacaaaaagtcattaatccaaattaaagacgcttcttggaaattaaacccatcaaacccagacggattgaaaattgcaaacagcggaaatttaccaggtggacagatgaactatccgctatatggtgtttttgcatacaaatgcagtatctccaatttaaataaaacgcttagcagtcttggagcggcaacgccttttcccaccatggcgatattaggcaaaggtgtttgcctcaataaatcaaatacacttactaccgttgaaagcaactcggagctgactcgcttctttatgagcttgtacttagagtgcattgaagaagaagcagcctcacgccaccacttcggcctaataagctggctggggaaaagctttttcactatgcagcccacggctacatagcccacacaatcccccccctaaacctccgaagatttttaaaaacatagaagatagcgttcgaaaagttatacgcgaatacggataattttttactatttgaaatagcatgtgcgtttcatgcaagtttcaatactattttttaaaccaattactctaccgccctttctaggagagatgtcatgaaaaccatcgtggtcggtgcaagcaaagggttgggcaaagccctgatcgaagggctcggcgagccgggggatacgctgatcggtgtgtctcgctcccgcccggaacagctggcccacaaggccggcgtcgaggtgcaatggatcgaagccaacctcgcgaaaccaacccaggcggcgcaaatcattgccgaggcggtggcaggaaacggcctggacacgttgatctacaacctgggcatctgggaagaattcgccttcgacccggcctacaacttcctggccgacgacgatgaccagatcgaagccatcgtcacctgcaacatcacctccaccctgctgctgatcaagcgcctgttgccggtgctgctcaagagcccccaccccaggatcattcttaccggctccacctccggcctgccgcaaagtggtcggccggaagtcgccttcggcgcctccaagttcgccttgcgcgggatcgccgatgccctgcgtgaaggttatcgccggcagcgcctggcggtaacctgcctgaacctgggttatctcaacaccgaagatcccttgagcaccccacgtgcacaggccgagcaaagggatgaaggccattcgattcccgtgcacgatgtggtgcaggtggtacgcatggcgctgagcctgtcttcggccagcttcgtcaaggaaatcaccttgccggcgatactggacgagcgcttttaacaccgggagagcacggcatgacccgcgatgaactcgccaccttctaccaaggctatatcgactgcctcaaccgccaggactgggaccacctgggtcatttcgtgcacccgaacgtgacctacaacggcgaagtcgtcggcctcaccggctaccgagccatgctggagcgggattttcgcgagataccggacctggtgttccgcatccagctgctggtggccgatccgccgaccgtggccagtcgcctgaacttcaaggtcacgcccaggggcgagttcttcgggttgccgatcaatgggcgccaggtgaggttcgacgaaaatgtgatctatgagctggtcgacggcacattcgcccacgtctggtcggtaatcgacaaagcggccatcgcgcaacaactgggcgactagactccacagacccattctcacgtggagaccgatcatgacccacaaaaacaccctttgcctctggtacaacggcacagcccttgaggctgcgaccttctatgcccagacctttccggacagccgggtgaatgccgtgcacctggcgcccggcgattacccgtcgggcaaacagggcgacgtattgaccgtggactttaccgtcttgggcatcccctgtatcggcctcaacggcgggccgatcttcccacataccgaggcgttttcgtttcaggtggccactgatgaccaggccgagacggatcgttactggaacgccatcgtcggtaacggtggccaggaaagcgactgcggctggtgcaaggacaagtggggggtatcgtggcagatcagcccacgcgtgctgacggacgcggtgacccaccccgaccctgcgacggccaagcgcgcgtttgacgcgatgatgaccatgagaaagatcgacatcgccgcgattgaggcggcgatagcggcggactaaggcagagcatccagcatggcgttggccgccagggcatggaccttgcgggtggggtgccattcgtcccagtaataatgcgcgtcggggttggcacacatcggtttagcctccgggtaagtagcctggcatggcgtgtcgaggtcggtgaaaccatgggccgccggattggcgcgcaatgcgtcgctgaaagccaggtggtcgaagtagctgacctttgccgtgccgatctgcgccagcacggccgggagtttctgcgcgagcaactgctggtattttttcgcgttggcgacttggttgccctggaccaccgcaggcacatggctgaggtctgtggtgcccaccaccatcacatgccgggcacccgctgccaccagttgctcagtggctttgcgaatattcgtcaggctcgattcgctcagtgcctcaagggtttccgtgtgggagaagtcggcccactcgaaaaagtcattggccgagatgaagatgaagtacagcgccttggggtcggcgttgtgggacttggcagcctgcaagtgctcggcgatctgccctaggacaccggtgtcctgggagggcatcatccaggtgtagtaattgccgtggccacttttggcgccccccaccgcgtagtcggtcagcggtgtgcgcagggcctgagccaggccttcgacggcggtcgagccgttgctccagcgccccctccagtacagcggcccaggcaacacctgggcctccttgatcttctgtgcagcgagccgtgtggtgagcgcttcgcccgcgccgttgtcggagtagctgtcaccaaaggcatacacgtgatcataggtcgaggcgccgaaggcggttgaagcggacagggtcagcagagcagccaaacacgcacgtcggatcatcgcgtttctcccggaatgtctgcacagactaccggttggcgggagccatgctggaaccattgcgacccgtacatatccagcggcggctatacagcggccatcctgctggttaggcttggcacctgcaacatccagttaaagttccagcgtcacccgccgtcacccttaaatccccgaatggactcaacgaggctctcgtgcgttttatcactccccttttgctgatcggtggcatcgccaccctggccggttgtgccacccagaaaacccaagtcgaaaccatgctggccggcgccctggcccagcccctggttgaaaacagtatcgtgcgcgaaggcgacgtgctcagcttcgaactgttgatgcctggcgatccaggcgctctgcgccgcacgttgcaagtcgaggccgcctgttcttcgccgcaactgcacttgctgtatctggacggttcgcaacgggtctaccccgccagtgccggtcgctacagttcgccccgcagcttgtcgccgcagttgcgtgcaaccctagccgccaaccagaccttcgtccgcgcctgtgccgaaacacccaagccggactggcgcctggtacagaccaacgagcgcgacaaccaggtgctgatcgacgccaacagtatcaagagcgtcaacggcgaaacgcgcttctgggccgccttcgataacccgacggtgctcaacgacctgccctacaacgccccctatgcgcaaaaacgcgagcactttgcggtgtcgtgcacaggcggcacctacaagcagttggccggctacgacatggacgccaacaaccgcgtcagcgacggccgggtcgacagtttccccacgccgcagaacatcgctggcagcaatgccgactacgaattgctgttcaacaaagtctgcgtcagcccggaaaagatcgctgcactgcccgcgttcaagccgcgcatgaaagcgccggccaccattgccctgacctcggtgcagccggcggtgctggcggccatcgcccagttgaacctggacaaacccacccgctcgttcaaatacgtccagttcgcgggcaccagcaactaccgtggcaagaccagcgataaccaaagcacgcagttcatcagccaggacgcgccgagcgggcaactggccctggccacccgtggcgacggctatgagagccaggccgtgagctggcgcaacctgttccacctggtgtcgaaagccacctacggcggttcgggcatggcggaaagctcgaccctgacccaactgagcttcaccggtaactggaaggcgctgcccgtgggcgagaccgtcacctacaccaccgcacgctccagcctcaacagcctgatcggcagcagcaccaacacgcagaccaaccgctgccaggtcgagcgtgaactgccggccagcgaactcaacgcgaaactggcgggcagcgccaaggcgttgtcctgccgcaccgacgacgacaagtacaagcgcgtcagccacctgtacttcctgaccgactacgcttacttctttgaatcgagcaccgacaagaacgagtttttctactccgactcgcgtatcgataaattcgaataaggcccgttgacacactctgcaatattccatgaagatggaggccttgttcagggtgtgtcagcttatgtccgcaatgccttccgttaaccgttccgtcattggcttgattgccaaggcgcaaggttgcgttgcgcacgccctcaaatcgaagaaacagtcgctcatgtgaccggggcgcgctgtcccgtcagatgagctgacaggacattgagcgcgacggtctactctcccttgcaccattccctctgcccttctgacggtgactcaagcggtcaatcatcaggagaaagtgcatgtcatcgtttcaaggtatctgggttcccgtggtcacgccgttccatgacggcgccatcgactttatcggcctgcgccggctggtcaaccacctgctggaaaagcatgtggccgggatcatggtgtgcaccaccaccggcgaagccgcgtcgctgagccgcgccgaacaactggcggtgctggatgcggtgttgcagctggtgccagcgcaccgcgtggtgatgggcctggcgggcaacaatcagattgagctgctggacttccagcgtgacatcctgcaacgcccggtggccggtctgctggtgccggcgccgagttacatccgcccgtcccaggccggcctggaagccttcttccgcaccgtggcggatgcctccagcgtgccgatcattctgtacgacattccctaccgcaccggcgccacgtttgagcaggccaccttgctcaacatcgtggcccacgaacgcatcgtggcgatcaaggactgtggcggcaacctgggcaataccctcgcgctgctggccagcggtgaagtggatgtgctgtgtggcgaagacctgcagatcttcaacgcgctgtgcctgggcgcgaccggcgcgattgcggcctcggcgcatgtccatacggaacagttcgtagcgctgtgccagcaggtacgcgacaaccaattggccgacgcgcgggcgaccttcatgcagttggtgccgctgatcaacacactgttcatggagcccaacccggcaccggtcaaagccgccctggccctgcaaggcctgatcggcagcgagttgcgcgcaccgatgcaggcggccagtgcggcggttgtcgcacgcttgaagcaggtgcagaacctgcccggctaatgcgccaaaaacagacagccagcggaccgtccggttgcgaccggaccgatcccggcctatcgtcgaacccacgctttgccttttgctgtccaacccatccgtattcaggtgacgacatgcccacgctgccccgccccgccgtgctcgaactgatcggcaacacgccgctggttcgggtcagccggttcgataccggcccttgcacgctgtttctcaaactcgaatcccagaaccccggtggctccatcaaggaccgcatcggcctggccatgatcgacgccgccgaacgcgacgggcgcctgcgccccggtggcaccattatcgaagccaccgccggcaacaccggcctgggcctggcgctggtcggccgggccaagggctaccgggtggtgttggtggtgcccgacaagatgtccacggagaaagtgctgcacctcagggccatgggcgccgaggtgcatatcacccgctccgatgtgggcaaaggccaccccgagtattaccaggacgtggccgcacgcctggccagggatattccggattcgttcttcgccgaccagttcaacaacccggccaaccccctggcccacgaaaccagcaccgcgccggaaatctgggcgcagacccaacatgatgtcgacgcgatcgtcgtcggcgtcggctctgccggtaccctcaccggcctgacgcgcttcttcaagcgcgtacaacccgaactggccatggtgctggccgacccggtaggttcggtgatggccgaatacagccgcagtggcaagatggaaacaccgggctcctgggcggtagaaggcattggcgaggacttcattccgtcgattgccgacctatccagcgtgcgtcatgcctactccatcagcgacgaagaaagtttcgaccatgcccggcagttgctcaaggccgaaggcattctcggtggttcctccaccggcaccctgctcgcggccgccctgcgttactgtcgcgaacagaccgagcccaaacgcgtggtgactttcgtctgcgataccggcacgcgttacctgtcgaaggtctacaacgaccaatggatgaacgacgccggcctgttgcactacaaacactacggtgacctgcgcgacctgattgcgcgacgcttcgaagacggccgcgtgatcagcgtgagccccgacgacaccctgctcaccgcgttccagcgcatgcgcctggccgacgtctcacagttgccagtgctggtggacggccagcaactggtcggtgtgatcgacgaatccgacatcctgctcggcctgcaccaggacgccagccacttcaccctgaacgtcgccagcgccatgaccaccaccctgcaaaccctggcccccagcgccagcctcgcgcaattgcaagcggagctggatcgcggcctggtcgccatcattgccgacgcgtcgggcttccatggcctgatcacccgcgtcgacctgctcaaccacctccggagatcccttgcatgagtcagtctgataaaagtgcgtttgccacccgcgtgatccatgccgggcaatctcccgacccgaccaccggcgcgctgatgccgccgatctacgccaactccacctacctgcaagacagccccggcgtgcacaaaggcttcgactacggccgctcccacaaccccacgcggtttgccctggagcgctgcgtggccgacctcgaaggcggcagtcaggcgtttgcctttgcctccgggctggcggcaatttcgacggtgttggagttgctggatgccggcgcccatatcgtctccggcaatgacctgtacggcggcaccttccgcctgttcgacaaagtgcgccaacgcagcgccgggcaccgtttcagctttgtcgacctgagtgacctgtcggcgtttgaagcaagtttgcaggacgacacgcgcatggtctgggtcgaaactccgagcaacccgctgctgagcctcaccgacctcagcgccattgcgcgcctctgccgggatcgcgggatcatctgcgtggccgacaacaccttcgccagcccgtggatccagcgcccgctggagctgggctttgatgtggtggtgcactccaccaccaaatacctcaacggccattccgatgtgatcggcggcattgccatcgtcggcgacaaccccgaactggccgaacgcctgggctttttgcagaactcggtcggcgccatcgccgggcctttcgacgccttcctcaccctgcgtggcgtgaaaaccctggccctgcgcatggagcgccattgcagcaacgccctcgacctggccacctggctggaacaacagccgcaagtggcgcgggtttactacccaggcctcacctcacacccgcagcatgaactggcgcgcaaacaaatgcgtgggtttggcgggatgatctcgattgacctcaacagcgacctggccggcgccaggcgcttcctggaaaacgtcaagatcttcgccctggccgaaagcctcggcggcgtggaaagcctgatcgaacacccggcgatcatgacccacgccagcatcccggcggcgacgcgggcgcagttggggattggtgatgggttggtacggttgtcggtgggggttgaggatgtggaggatctgcgtgccgatttggctcaagccctggcacatatctgaataggttggctcggtctatgtgatgggcgggctcgctgtggcgaactggcttgttgtggcgagcgggcttgccccgcgttgggnnnnnnnnnnnnnnnnnnnnnnnnnnnnnnnnnnnnnnnnnnnnnnnnnnnnnnnnnnnnnnnnnnnnnnnnnnnncccaacgcggggcaagcccgctcgccacaacaggcccgctcaccacagcaagccagataggcgtcaagccgaggtgaccttggcccgcgccgcatgcagcttcttgtagctgtcgatcaagcgcagatgccggtccaacccttccagcttcatgctggtcggcgtcaggccataaaagcgcacatcgcccttcaccgagccaatcaccgcatccatccgctcatcgccaaacatgcgacggaagttggcttcgtagtcggccagttccaggtcatcgtccagttccatctccagcaccgcattcatcgcctggtagaacaggccacgctcggcggtgttgtcgttgtattgcaggaacatctccacgcactccttggcctcttcatattgctgcaaggccaggaagatcagcagtttcagctccaggatggtcagttggccccaggcggtgttgtcgtcgaactcgatgccgatcagggtggtgatatcggtgtagtcgtccagttcgctttcgatcaggcgctcgaccaacgcctgcaattcttcctcgttgaggcgatgcaggttgagaatatcctcgcggaaaaacagcgccttgttggtgttgtcccagatcaggtcatccaccgggtagatttccgagtagtccggcacgaggatgcggcaggcggtggcgccgaggtgttcgtacacggccatgtacgactctttgcccatgccttcgagaatgccgaacagggtcgcagcttcctgggcattcgagtctgcgccttcgccggtgaagtcccactcgacgaactcgtaatccgactgggcactgaagaagcgccacgacactacgccgctggagtcgatgaagtgctccacgaagttgttcggctcggtcaccgcctggccttcgaaggttggctgcggcagatcgttcagcccttcaaagctgcggccttgcagcagttcggtaaggctgcgctccagtgccacttccaggcttgggtgcgcgccgaaggaggcaaacacgccgccggtgcgcgggttcatcagggtcacgcacatcaccgggaattcgccgcccagggaggcgtctttgaccaacaccgggaagccctgggcttcgaggccctggatgccggcgaggatgccggggtacttggccagcacctcggccggtacgtccggcaaggcgaattcgccttcaatgatttcacgcttcacggcgcgttcgaagatctccgacaggcactgcacctgggcttcggccagggtgttgccggcgctcatgccgttgctgaggtagaggttttcgatcaggttggacgggaagtacaccacttcgccgtccgactggcgtacgaacggcagcgaaacgatgccgcgcgcttcattgccggagttggtgtcgaacaggtgcgaaccacgcagctcgccgtcgcggttgtagaccttgaggcagtaggcatcgaggatttcgctcggcagttcgtcatcagggcctggctggaaccagcgctcatccgggtaatgcacgaacggcgcactggccagttcctcgccccagaactgatcgttgtagaagaagttgcaattgaggcgctcaatgaactcaccgagtgccgacgccagggcgccctctttggtcgcgcccttgccgttggtaaagcacatcggcgaatgcgcatcgcggatatgcaacgaccagacgttgggcacgatattgcgccacgacgcgatctcgatcttcatgcccaagccggcgaggatgccggacatgttggcgatggtctgttccagcggcaggtccttgccggcgatataggtgccgccctcggacgtcgagttcggcatcagcaaggcctgggcgtcggcgtcgaggttctcgacttcttcgatgacgaattcaggcccggcctgcaccactttcttcacggtgcaacggtcgatggaacgcaaaatgccctggcggtccttctcggaaatatccgcgggtaactcgacctggatcttgaagatctggttgtagcggttctccgggtcgacgatgttgttctgcgacaggcgaatatggtcggtggggatattgcgcgtctggcaatacagcttcacgaagtacgccgcgcacagcgccgacgacgccaggaagtaatcgaatggccccggtgccgagccgtcgcctttgtagcgaatgggctggtcggcaatcaccgtgaagtcatcgaacttggcttcaagccggaggttgtcgagaaagttgaccttgatttccatgggggcacaccagaataacggctaaacaaaaatggccgccattatgaggggtttcactgggaagtttcaggcttttgaccagtggctggcgaattgacccatatggattaaccttttcgcagttggcgccgatggactgagggcaaccagggagtagtcggaatgcgcaataaccagcccgtaacacagcgtgagatttccctcgcgccttcgcaaaaactcatttctgccacggatgtccgaggtgtcatcacttactgcaacgacgcctttgtcgacatcagcggctttgaacgcgccgacctgatcggcgcgccgcagaacatcgtgcgccacccggatgtgccgcctgccgtgttcgcgcacatgtggagtgcgctcaagcagggcctaccgtggatgggcatcgtcaagaaccgctcgaaaaacggcgaccactattgggtcaatgcctacgtcaccccgatcttcgatggcagccaggtggtcggtttcgagtcggtgcgggtcaagtccacggccgatgaaatccgccgggcccaggccctctatcaacgtatcagccaaggtaaaccgggcgtgccgcgccaggacgcctggctaccggccgcgatcaattgcgtgccctacgtggccaccgcagtggccggcagcctcgccggtctgttcctcgacgcgccgctggcaattgccgtggccgtcgccgtcgcggtgccagtgggcgtgctctgctcacgctggcgccaaggcagcaccttgcgcctgttgcagggcgttgagccctcgacgtcggacgccttgatcgcgcagatgtacagcgacgccagcggcccgcaggcacgtttggagaccgcgttccaaagccaggccgcgcgcctgaaaacctgcctcacccgcctgcaggacagtgccgaacaactgagcgccctggccgggcagtccgatcagttggccaccgccagctccaagggcctggaccgccagcgcgtcgaaaccgaacaggtctcggccgccgtcaaccagatggccgccaccacccaggaagtcgccagccacgtccagcgcacggcggatgccacccagcaagccaatgtgctgaccgggcgcggccgtgaagtcgcacgggacacccgtgaggccatcgagcgcttgtccagcgtggtcagcgaaaccggcgcgaccgtggcgcaactggcgcgggacagcgacgaaatcggcagcgtggtggacgtgatcaaggcgattgccgaccagaccaacctgctggccctcaacgccgccatcgaagccgcacgtgccggtgagcaagggcgcggctttgccgtggtcgccgatgaagtgcgccaactggcacagcgcacgtcgcagtccaccacccagatccacgcgctgattacccagttgcaggcgtcgtccaacaacgccgtgcaaagcatggaaaacggccaacgccaggcccaggaaggcgtggcctgggtgctcgaagccgaccaggcgctggtgggcatcagcgaggcggtgtcgcatatcaccgacatgaccacccagatcgccgccgccaccgaggaacagagcgcggtggccgaagagatcagccgcaacatcaccaccatcgccgaactggccgaccagacgtcgatccaggcccatcaatccacggacctgagcaaggaactgacgaacactgcgtccacccaatatgcgttggttgagcggttcaaccgctgagccgctgctgaatgcctggctagccggtttgttgtggctagccggtgtcctgtggctatccggtgacctgtggcgagcgggcttgccccgcgttgggctgcgnnnnnnnnnnnnnnnnnnnnnnnnnnnnnnnnnnnnnnnnnnnnnnnnnnnnnnnnnnnnnnnnnnncgcagcccaacgcggggcaagcccgctcgccacaacaagcccgctcgccacaccaatctccttcaccacaacatagtatgctgaggctcacctccacccattcacgaagcccacccatgtccatcacggataacctcctcgccttcaccttcgccgccaccctgctgaccctcacacccggcctcgacacagcactggtgctcaggaccgccacggtcgaaggcaagcgccaggcgctgcaagccacgctgggcatcaacgccggctgcctgctgtggggcgctgcggttgccttcggtctgggcgcactgatcgcggtgtcggaagtcgccttcaacctgctcaagtactgcggcgccgcgtacctggcctggctgggtttgaacatgttgctgcgcccacgccgctcattggccagcgccgaggtgcaggtcaagccggccggcaactggtttatcaaaggcatgctgggcaacgtgctcaaccccaaggtggggattttctacgtgtcgttcctgccgcagttcatccctcagggccagccgttggtgctctggacatttggcctggtcagcatccatgtgctgctcggcctggtgtgggcattggtgttaatcggtgccacgcagccgctgtccgggtttctgcgccgggaaaaggtgatccagtggatggaccgcaccactggaatgatcttcatagtgtttgcagcgcggttggcattcagcaggcgctgatccgtatggacagttcaatgtcatcggcaaacggcaccgacacgtagccgttctccggtgcacgtacgtaggccaggtattcagggcagtaatcggtgttgtccgccaccaccagcgcgccgggacgcaggtgcttttctaccaggcccagcacatcgccatacagcgtcttggcgccgtccagcagcaacaaatccacgctgtccggcaggtccctggccagggtgaccagttcatcgccttcgcggatctggatcaggtcactcaccccgccttcgatgaagtgctcgcgcgccagggcgatcttcgaggcttcgaattcgctgccgatcagcacaccgccgccgttgtcacgcagcgcagcggccaggtgcaaggtggacaggccgaacgacgtgccaaactccacaatcgcccgcgccttgctgctgcgcgccagcatgtagagcagcttgccagtgtcccgcgagaccggcagccacaggtccttgagcagcgaatacagcgccacgtattcggtcttgctgtgcatcagccgatcgcgttcctccttggataccgagttcaccaaggggctggtagcggcgctggcttgggtatacagacgttcgatcagggacgccaaaggcgcagtggtcaggctcgacataattgatttccgtagagtggggactaagatgcgactaattcgtcgcattaaaagtatgcgagtgattcccatccttcgctattcgcattcgccctgcttccggagccctgtatgaccagccgccagaccccacgtatttccacgcgcaaacagccgcaacaggcgcgctccaccgagctggtggcggcgattctcgaagcggctgttcaggttttggccaaggaaggcgccacccgtttcaccaccgcacgggtcgcggaaaaggccggcgttagcgtggggtcggtgtaccagtacttccccaacaaggcggcgattctgttccgattgcagagtgatgagtggcagcagaccacccggatgctgcgcaacattctggagaaatacgacgaagcaccgctggatcgcctgcgcaaactggtgcatgcctttatccagtcggaatgcgaagaagcgcagatgcgtggggcattgaacgatgcggcaccgctctatcgcgatgcgccggaagcgctggaagtccgggcggcaagccgggaaacgttcgacgcattcatgctggagttactgccgcaggtctctgagcagacacgcgcgctggcctgcgacttgattcgcacaacgctcagttcggtgggcaaggatttttcttgcagcccgcgcaccgcgcaagaaatcgctgtgtatgccgaggggatggctgatatgtttcgggcgtatgtgaatgcgcttaaccatccctgaagcgtactgccccggcatctacccgctgcgcaatagatgtccagacctatagcagaactaccgcaccttctgaggcgtcagccagccacacagtcaataacaagtcattgactgagcaatggccatatgatatcaaaccagctcatggatatgacacttataacaataatagggatggagcctacatgcagaaaatcatgagaaaaaccttacctcttttatgcatgttcaccgttgcagttcaactatcaggatgttcacaaaacgttgtcattcaaggagcggagacacttggcaatgatgccagcgcctacttgaagtcggataatggttggtcttggggcgggttagagacaaccgtaatcgccgtctacccaaaaacgggaaaaccgctgttagaacaaaactttttcctggactacagcaagataaaaatcgcccctggcctctatgcagttgctttaagagtcaattatggcaatgccatagcatttcctgtggttagggtcgaggccaaacctggcaagacctatctcttcacagccaagcgcgtgatggacggagtagccatcaaagctgagtataaagaaaccaacaccatcgattaaatccaaggacggaaatatgaggcagagttttgcatttctttttttaatgctgctggccgggataaccgggtgtgtgtctcggaatattccattaatcgaagacgacactgaaacctcaactaaggttcgtttcgtttcaccgcgagagatgggttggattaatctataccccgagacagactgcaacaacggcgccctcgtggtggtcgacaattccgttgataactttatagagtcactgcgcgggcactcgccaaaaagaataggaatgatcgactctccagaccccaactctcaagcagcggcagaatactcgttcaaaggcggtcagactctcaatatcggcgttacccccttccctggacgctgccttggcggtctaagctttcccactgaacccggatcgcaatatgaagttgtcctggtgagcaatacatcgaacgggtgcaaattcaaggtcagtaaactcaccctgctcaatggctctccccatcgggagcccatcaacaaaatagctccactgatttgcaagtaacccgtcaagtgaaccggtccttcttccgtagacgctttcaaaggaccgcttctggccgatttctgcctgttgcagcgggcagcaatctggatctgaatcaacgtacaaggaggcgtgaagtgcgcgacaagcagatctgggaactgacagaaagcgatctgcacgctgttggggtatggtgctttccgatggacgattccgttgaagatgaatgtacagtccgaccttgtgttgaggaagtaggcttggcgatgatcgtgcgagctgagttttgcgctgccgatggcacgctctatcttggatacgtgcactggagtctggatgaacatattggccaccgacaacctacgctgttgctcaatgacggcacagcggtctcgttttgggggggcattgttaaaccctcctgggatgaagcctcggatgaggcgaaacggatttctttccctatcacattcaagtctgaaccattgctcgggctcacgccgatggttggctgcctagaagggacgtattacctagatagcaatgaccagatttcttgcctttcgataggtgaaaggtgaggacaatagctactctaatctgactttcaccagtgcctgaatgcggcaaataaaacgacgcgtgtcgatcggttctggccgttttcagcccatcactccagattgcgcagaatcaagcgacattggaaatgccccttttctagtgtgttctcaacgcattcgccagccgcaccatcgccgtttcgatctcatgagcagtcaaggacgcataccccaacagccaaccctgtgtcttcttatcgccagcgtacaaccggctcagcccagaaagctgcacattcgcgctcgccgcctggcgaatggttttttcttccgaccaaccctcggcaagcagacaagggatctgcagcccgccttgggggcgcagcgcggtgactatcccatccaggtgcttgccaatcgcatcgagtgtggcggttcggcgtgcagcatagagtttgcgcatggcgcggacatgggcgttgtaatggccatcttccataaagcgcgccagtgtcagttgcaagacttgcggtgtgtggccatccatgatgctgcgcgcgtaagtaaaggtcttgaccaactcatggggcagtatcatgtagcccattcgcagccccgggtagagcgtcttgctgaaggtgcccaggtagatcgtgcgccggtgcttgtccaggccttgcacgcaggcggtcggatgcccgtcgtagtgaaactcgctgtcgtagtcgtcttcgatgatccacctgccctgctccgccgcccagttgatcagctctagtcggcgctccagcggcaacgtcgctcccgtggggtattgatgagacggtgtgacatacacgcagttggcaccgctacgatccgcccgcagcaattgcgtgcggatgcccagttcatcgacgtcaatgccgacgaccttggcttgcgccgcttcaaaggctttcctggcaccgaaatagcccggattttccagcaggatcgattgaccggcgtccaccagtaacaacgcacacaggaacagcgcctggcgcgtactgctcaacaccaggatctggtccggggagcactgggccccgcgctcaaggttcaagtaggtggcgatggccttgcgcagcggcgcggcgccctgggggtcgccatgcagtaacacgttggcgcgatggtccttcatgacctggcgttgcaggcgctcccacacgtcgatggggaaggtgcgggtttccggcaggccggtggcaaacgcagtgaccgcctgctggtcagtgacgccaccactgttgaaaatcatccgcccgcgcaggctcaatcccgcccttggcacctcctcccggtggttcatgtcttggggtttgctacgcctgcgtgctgcgccatgcagttgggtgccaagcgcgtcgcacacgtagctgcccgccccctcacgccgcacgatgaagccatcgcgatgcaattgcacataagcgttctccaccgtgtcgcgcgcaacgccgagtgacttcgccaaggtccgggtagaaggtaacttcagaccgggatcaagggcgccatcgaggatcaacgcccgcagcgcgcgctgaatccgatggttcagatccaacagcttgagctcggcatcgtcgagtcgcattttcagcgtatccaactcgaaggtttttgccatgtggtctggttgactccgcaaaagtgtaggggcgaaacataccatttcaagcctataaatggcgcctccaccaagcacctgactttgcaaggagcaaagcaacatggcctcttccaacgcccactcgcccattcaactacgcgaccttttccacccgattgtcgcagggttggtttcggtcatcgtcaactatggcggcacgttcattctgattttccaggccgccaaggtcgccgggctgagccctgagctgacggcttcgtgggtgtggtcggtgtccatcggcgtgggcattaccgggctcactctcagctggctgacccgtgagccgatcattaccgcctggtcgacacctgcggcggcgtttctggtggtcgcactcgggaccaccccctatgccgaagcgattggggcgtacatcctttccgcggccgccttcgtgctgctgggtttgtcagggcagttcgaaaaagtcatccgcctgattccccctggcgtggccgcagggttgttggccggtatcctgctgaaattcggtatcggcgcgttcggcggcatgagcgtcgacccggtattggtcgggctgctgattaccgcttacgtggtactcaagcgctttaccgcacgctacgcggtggtgggcattctggtgctggggatgggttttttgctgacccaggggcgcgtggatttttcggggctggcgttgcagttcgcggtcccggtcttcacccagcctgagttctcgttgaatgccctgctcagtgtcgcgctgccgttgttcctgatcaccctgacgggccagtacatgccaggcatgctggtgcttcgcaacgatggcttcagcaccagcgccaatcctgtgttgaccgtgaccgggctgggctcattgctcatggcgcccttcggttcccacgcgtttaacctcgcggcgattacggccgccatttgcaccggcaaggaagctgcgcaagatccgtccaagcgctggatcgccggggttgcagcgggcgtgtgctacctcgtgatcgggattttcggggtcacccttgcagcggtgttcatggtgctcccggcaacgttcatcacgaccctggccggcctggccttgctgggcgcgatcggcgccagcatcgccagcgccatggctgacagtcaatcccgcgaagcgtcactgatcaccttcctggcctgcgccgccaacatcacggtgtttggcatcggtggggcgttctggggattgttgattggcctgggggggtacgccgtactcaacgggcgctggtcgcggcgtgagtcggtggtcggttctgccgtcaaacctgttgtaaggactgaggatgccgccaactgatgcaggtgcctggtgcaaagtgatcgccagctaggtcgtcggctcctcggcaccagacggcgcccgataacagcctggcgcctgtctgtgcaacgaaggccagccttgcgtgtagcgagccatacactcactacacgtccagaagatagcccccttcagagcatggctttattgataaataaattgatacccaacgatgtaagaaccgatcttgttagcgtgggccgttacccgcaccgccgtcatgccccgctgtatctgatcattcaaatccgctttattcgtgcacagttgaatccagcgctcggtagtcacatccttgatccacacgccggcctcacaacggctcagctttcccaacgcgggccctgggaaagagatttcataggctgactcatagtgaatggtatctcccggcaataaataagcagcgacatcatacccttgtatggagcaagcaaaaccgacgcaaaaccagccgaaaaaagcgtccatggcgctttttagtgttctcccgcccccgccacgcaagacgcccctgcaagcgaaaaccagtccaacgacacaaccgatagcgatataggtcgtccactcagggatcgacggcatcaaaacggtccgcaggccgatacgcgacgcccagagcatataaacgatccaccccccaagcagcgcaaacgcgaccaacgtgatcgcgatctttcttgatctgttttcgaacgaagggtatttcacttcttgactactcaatgactgacctcagggtgtactccgtatgatgcagcaaaaaccaaccgatacctgacttcttccagtgttgcaccgcccctcacgaggttgcgctcagtgcctggctccgcgacacagcccgcccggcgataaaaccgtatagctcgttcattaaggctcaacacccaaagcgtcagaccctgatagccctgctcgctcagatactcaacgccggccgtccacaacgccagccccacgcctgtttgccagtacccggccaacacatagatggccatgacctcaccggtgttggcacccgcagcctcctcgtcacggctggcaccgaccgatatccaaccgaccacctgtccgtccacctccgcgacccaaaccttgggctcgtccgactcaatcgagtgcatccagaaggattcacgctgcgccagggtcgcttgcaacccgctcaaatactcggcaggcatcaggttacggtaggcgtcctgccaactgctgatatgcacttgggcaatggcccttgcgtcgtcgggtaatgccttgcggatcatgtcggtattcctttttcgagcattggccttccagtaaacccacgccttatgaccgtttatattcgccggggggcgaggtggctatccggcttcgaacaaatcgctgtctgggcgcacacattggctgatatgttacgagcctcacgagcaaagggatgcgccatgccaacgttagccagcaacgccgcactgctgatcatcgacatgcagcaaggcatgaaccagccgaagctgggacgccgcaacaaccccagtgccgaagcgcagatacagcgcctgctgcaggcgtggcggcagtctaagcgcccggtggtgcacatccgccacatatcccgctcgcccgactcggtgttctggccgggccaaccgggttgcgagttccagccggcgctgcaaccgctggcgcatgaacatgtggtggagaagaacgtcccggatgccttcacagccacgggtctggagcgctggttgcatgcgcgcgggatccaccaactggtgatcgtcggcgtgatcaccaacaactcggtcgagtccacggcacgttcgggcggcaacctggggtttgaggtgacggtggttgccgacgcctgctacaccttcgaccagaccgatttgtccgggcgcccgtggccagccgaggatgtgcatgcgctgtcgctgagcaacctggcgatggattatgccaaggttttggagaccactgaaatcctgggtgggttgtgagcatcacgcatgagaccggcaagcgaatcgtggtgattggtgcgggtatcgtcggcgcatccttggcctaccatttggcccactcgggccgccaatcacccacgtggagcttcgccccattcccgtggatggcctccccatcatcggctacctaccaactgtcggtggtgtctacgtgtgcgccatacatccgggggtggtactggcacccgtggtgagccggctggccagtgaagagatcatggacaacaccctcttcgatgcgcttgccccctgccgtcccagtcgattcgttcaagggctgacgcccgcaccctgaagcatttccaagagtccctccggccacaccgtttcttctgttgttcgaagttcagcggcggaccaccagcgatggtcggccatcacctgtgtctcatgcacagtccattcggcttttgacagcgcctcattgggcgcctgaaccacaaaatactgttcgatggccaacactgtttcgccacagggcaacatcaacgtcacgcggcgatcccctacaggcgctgcaacggcctctacctctatgccggtttcttcgcgcagctcacgtatcgcagccgcctcgaaggtttctccggcctcaacacctccgcccggggtcgcccagtaattttgcccggccagtgccccgtctttatgtacgaatctgaacagcagcactgcgtgtgaggggctgatcaccagtagccgtgcggcctttcgctcgcgcattattttatgccttccttgaaacgtgggtttgattacgctatcgcgggctgaccgcgtcaggcgttcaagcgttgtgcgatggccttacgcagctccccatgcgggtcttctgcgtaaggcagcgcattcttccaatcataaaaccacgctggcatccggcgtttatcatccggctccgaggcgtagcgcgggaacaaatggcagtgcagttccggctccgaattgcccaggatctcgtagttcatgcgcagtgcaccggtggcctgcaacaccgcgtcgcccaggcgcgccatgtccagcaggtagagggtacgcgcctcggtatccaggtcattgaggctggcaaccaccgggtccggcaacaacaggcaatagccgggcaggaactgcacatcccccatcaccgcccagcccgaggccatgcggcagatgaccttgtcgttggtgccgttgcgggcctgcgtcacgcgttcggtgataagcgccatgcaaaatccttggtcgagatgaggtccaggcagcatcttaacgcgacctcaagccctggaatcaacccatgcgcattgcctgcataccgcgacccgcaacatcaaccgtgtgcgccctgcaaaacccgctgaaggtaagcgtccagcacatcgatattcgctgacgaaacaatcgcgccgatatacccatcaggccgcaccagcacccactcgccaatcgccagttggtaggcacgttgaaactgaccctgctcgtcaatcacatctccctcaggcccaacgatatggacctgcacgcccggccaagcgggcactgaatcacgcgtgacgctataccccagcagcgtccagtgcgtaccctggaacagatggaacagccgcaacgcctgcccggcggcacctcgcagcagcgcgtccggcgcgcggtcacccgctgcaacgccgttacgcttggggtgctgcaacgccaatgaggactcggggtagccgatgtccagttgatgcacttccctgccccggcgcagttcgccgtgctgcatgtcgcccagcagtctggtggacaaaccgagcacggaggcagccaccggccggcgctcttcttcataggtatcgagtagcgcctcaggggcgccctgcaccaccgccgccagcttccagctgaggttgtaggcgtcctgcacactggtattgaggccctgaccaccggtgggcgggtggatatgcgcggcgtcgcccaccagcagcacccgcccccggcggtagtgatcggccaggcgtgcattcatggtgtaggccgatgaccagctcacgctgtgcacctggatatcggcgcgcccggtgcgttcggcgatcagtgcggtgagcccttcggcgctgaagtcgatgtcgccatcggctgggatcgggccctgaagctggaacagatcggtgccagccagcgggcagatcgcaatctggcgttgcatgtcgccttcgccaaagcggtgccaggcctcacgcgtcaggccggtaagcaccccatccgccaccagtgcacgcacgcccagggtcttgccggggaagccgatagccagcgcaggccggacgaagctgcgaccgccatcggcgcccaccagccagcgcgcacgcaggctcgcttcgccgcccttgccggccagcctggcagtgacaccgtcggcgtcctgttcgaagccgaccagctcacaaccgaactcaggccggtggcccagctcaagcaggcgctcgcgcatcagctgttccgtcagaaactgcgggaccatcaagggttgctggtagggctcggccggtgtcggcgccgtggatgcgctgaaatcggcatcgctgtagctgccgtcgtcgcggtagcgccggtcagtcggatagactccacccaccgccatcaagcgatcgagaatccccaggtcttcgaagacctcctgggacctgggctggatgcccttgccacgcgagccatggaaaggccggggatttttttcgatcaggcgaaaggtgatgccccttctcgccaggtcgatcgccaaggtcaggccggcggcaccggcaccacaaatcagtacatcgacagccgattgcgctttcatactggatcacctatatgtgcaatacgcacatattaagagaggcgaacaccgtgtcaattaaaaatgtgcaaagcgcacatatatccgcccagctgcgtgacctgcatggctcgctggttgaaatcgtcggggtgatgaaccgcccgcaacgcgacgaggcaatggtgcgcgaggccggaatttccctggaccgcgccctgtttccgttgctggtgctggtggagcgcctgggcccgattggcgtggttgaactggccgaccgcgtgggccgcgactacaccacggtgagccggcaggtggcgaaactggagaacctgggcctggttacgcgccaggcaagcgcacttgaccgccgcgtgcgcgagtcagtgatcaccgataaaggcaaggccatgaccgaccgcgtcgatgacgcacgcgagaggataggtgtgtcgatcttctccacctgggaggaaggcgattttgacaatctggtgcggttgatgcgcaagtttgccgaggacatcaaggaggattccgtgcgtgcgacgaaggggatttcctgaggccacccacttgttggtttgctgtggcaagcccgctcgccacaacaagtccgttcacctcagcaagcctgcgcacggcatcaatccaatgccaattccaccaccccgccgttcaaccgcaccggccatacccgcaaccgctgctccggggtctccaggcactgcccgtcttccagccggtaatgctgcttgtagatgggcgccgccaccaccaggtcgcccttgatgctgccgatcaaaccgcgaccgatcacattcgccccggactccgggtcgtgattgtcgatggcatacagcgtctgcgcctgcgcgcccggcaggtagaacaacgcgacttgcgcgccgtccagccacaccaccacgccggagtcgcgcaccaggtcttgctcgcggcacacctgtgtccaggtggccaggtggcgttgggtattggtttggctcatcaggcaatctcctcggtgacggcaatcaggttgagttcagcagccatgatcggccggcgttggccgcgttcctggacgaagtggatgtccgggtcggggcgtttgtcgttgacgaaggtgcggaaacgcttgagtttttccgggtccttgagggcgttggcccactcgcattcgtagcggtcgaccaccagttgcatctgcgcttcgagttcggcgcccaggcccaggctgtcgtgcaggatcacgtccttgaggaaatccaggccgccttccaggctctcgcgccacaccgaggtgcgctgcaacttgtcggcggtgcggatatagaacatcagaaagcggtcgatgtagcggatcagcgtggcgtcatccaggtcggtggcgaacagctccgcatggcgcggacgcatgccgccgttgccggcgatgtagaggttccagcccttctcggtggcgatcacgcccacgtccttgctctgggcttcggcgcactcgcgggtgcagccggacaccgcgaacttgagcttgtgcggcgaacgcaggcccttgtagcgatcctcgatcagcagcgccattttcacgctgtcttgcacgccgtagcggcaccaggtgctgcccacgcaagacttcaccgtacgcgtggacttgccatacgcatgcccggtctcgaaacccgccgcgatcaactcgccccagatatccggcaactcgtgaagctgtgcgccaaacaggtcaatgcgctggccgccggtgatcttggtgtagaggtcgtatttcttcgccacctcgccgatcacgatgagtttttccgcggtgatctcgccgccaggaatacgcggcaccaccgagtaggtgccgtttttctgcatgttggccatgaacgtatcgttggtgtcctgcaatggcaccagggaagcgtccatgatcggctggttccagcacgacgccaggatcgaacccaccgccggcttgcacacgtcgcaaccggtatggccacggccgtgcttggccagcagttcgtcgaaggtgatgatgccttccacacgcaccagcgcgtacagctcctgccgggtgtaggcgaagtgttcgcacaggctcttgtcgacactcacgccacgcgcaatcagttcatgttcgaacacctgcttgagcaacccggcgcagccaccgcaaccggtgcaggccttggtctgggacttgagcaggccgaggtcgctgcaactgccgtcgatcgcagagcagatcgcacctttggtcacgttatggcaagaacacacggtggccgattccggcagcgcaccggggccgagggtgggtgcgccgctggtggatggcaggatcaggccggccggttcggacggcagtgtgatgccgttctgcatgtactgcagcaaagtgtcgtagtagctgttgtccccgaccagtacggcaccaatcacctgcttacccgaagcatccaccaccaggcggcggtagctcgcgctggcctcgtcgatgaattgatagctgcgcgcgccaggcgtgtgggcgtgggcatcgccgatggagcccacgtccacgccgagcaacttgagcttggtcgacatgtcggcgcccacaaacggctcggcggtttgcccacagagcagcgcggcgacgccccgggccatctggtagcccggcgcgaccaggccgaacaggctgccgttccaggaagcgcattcgccaatcgcgtagatattcgggtcgcagctcaggcattcgtcgttgatcaccacgccgccacgcgggccgatgtccaggccggcctggcgggccagtgcgtcctgggcgcggatgccggcggagaacacgaccaggtcggcttcgaggaattcgtcattggcaaagttcatgcggtagcggtactgctcgccggcgctgatcgactgggtcgcccgtgacaaatgcacgcccacgcccagccgctcgatctgcgccttgagcgccaggccgccgaagtcatccagttgcaccggcatcaggcgcggcgcgaattccaccacgtgggcttcaaggcccaggcttttcagcgcgttggcggcttccaggcccagcagaccaccgcctaccaccacgccgcgtcgggcattggcggcggccttgcggatcgcatccaggtcttccagggtgcgatacaccaggcgcgagtcgccctcggcgccttcgattggcggcacgaacgggtaggaaccggtggccagcaccagcttgtcataggcgacacagccatcggcggtgatcacctcacagcgggcgcggtcgatctccagcaccggcacgcccaggtgcagggtcacccccggcgtctggtacagcgcagcgtcggacagcgccagcgactcggcatcgcgcccggtgaaatactcggacagatgcacccggtcataggcgcgcatcggctcctcgctgaacacatgcaaacggtagtgatccagcgcgccgcgttcgatcagttgcgccacacagtggtggccgaccatgccattgccgacgacgatcagggttttgagactgttcatataaatcacctgacaaagctcatcacggttttaaaagcaaaaaaaaacgcctgaaaccttgcggttccaggcgtctttgcctgttcttgtgcgggtttggatcgggcgactgcgccggattcaccgctattgccctggttgtcgatcgtcgttgaccgaggtgggttgcaggggagcttgcagggtctgtgccaagcgaagacccggcccgcgcttactgcattacgcgctcaacaacggctatgaacgtgagcagaatcgcctccaactggtgcgcctcgcgtcataaaagtgcacaacccttcctcctgtggtgaggggcttgttgtggtgagcggggctgttgtggtgagcgggcttgccccgcgttgggctgcgtagcggccctaaaggtaaacgccgcgatctttctggaagatcgcggcgtctggatcagggctgcttcgcagcccaacgcggggcaagcccgctcaccacaacagccccgctcaccacaacaagcccctcaccacaggaggaagggntgggctgcgtagcggccctaaaggtaaacgccgcgatctttctggaagatcgcggcgtctggatcagggctgcttcgcagcccaacgcggggcaagcccgctcaccacaacaagcccgctcaccacaaaaagcccggccaccacaacaaccccattcacccagcaaattgcatcaggaaaaacctggcgcgtgacttgctaggaacactccaaccgggcagtcaacgcagactgccctctcacgacaaaggcgccgtgtaacccccgttctgaacggagggttacaaggcgccttttttgtttatacgggtttcagatggccaaccaaaacatacgcagtgtgtgtccctattgtggcgtgggctgcggcatcatcctgcaggtcgagcacaataaagtggtcaaggtgatcggcgacaaggcccatcccaccaacttcgggcgcctgtgcaccaagggcaccacctgcggccaggccatcgccgagtcgggccgtatggagaacgcctatgtgcgccaggcccgcgaccatgacccggtgcgcctcggtatggacaaggccatcagcgaaaccgcccggcgcctgcgccagaccctcgacacacacggcccggacgcgctggccttctatgtatcagggcagatgtcgctggagtcccagtacctgatcaacaaattggccaagggctttgtgcgcaccgccaacatcgagtccaattcgcgcctgtgcatggccagcgccggcagtggctacaaactgtccctcggttccgacggcccgccgggctcctatgaagacttcgaccgtgccgacctgttcttcgtgatcggcgcgaacatggctgactgtcaccccatcctgttcctgcgcatgatggaccgggtcaaggccggggcgaaactgatcgtggtcgacccccggcgcagcgccacggcggacaaggccgacctgttcctacccataaaaccgggcaccgacctggccctgctcaatggcctgttgcacctgctggtgaaaaacggccataccgaccctgccttcatcgcggacttcaccgaaggctgggaagcgatgccgccatttctggaggactattgccccgagcacgtcgccgccatcaccggcctcgccgaagccgatatccgccaagccgccgactggatcggccaggccgccgagtggatgagctgctggaccatgggcctcaaccagagcacccacggcacctggaacaccaacgcgctgtgcaacctgcacctggccaccggcgccatctgccgcacgggcagcgggccgttttccctcactggccaacccaatgcgatgggcgggcgcgaaatgggctacatgggcccgggcctgccgggacaacgctcggtgctcgtcgaggcagaccgcgcctttatcgaggacctgtggcaaatcccccacgacagcctgccgcgccaggccggcagcggcacggtggcgatgttcgagcagatggccgctgggcagattaaggcttgctggatcatctgcaccaacccggtggccagcgtgcccaaccggcaaaccgtgatcaacggcctgcaaaccgccgaactggtgatcagccaggacgccttcctcgacaccgagaccaaccgctacgccgacatcctgttgcccggcgcgctatgggccgaggccgaaggcgtgatgatcaactccgagcgcaacctgaccctcatgcaaaaagccgtggacgcccccggcgagaccctgcccgactggcagatcatcgcccgggtcgcctgtgagatgggctttgccgaggcctttacctatgcctgcgccgccgaggtgtttgaagaaatcaaacaggcctggaaccccaagaccggctacgacatccgtggcgccagctacccgcgcctgcttgaaaacccggtgcaatggccctgcgcttcggttgacgcagcgcaccgcaacccgatccgctaccgccatggcggcaccctcagcttcgccaccgaaaacgccaaggcgcggttcttcgctcgcccgcatatgccgcccgccgagatgcccgacgacgggtttcccttcgtgctcaatacgggtcgcgtgcagcaccagtggcacaccctgaccaagaccggcaaggtcgccaccctgaacaaactcaaccccggccccttcgtcgaactgcaccccgaagacgccgcccgcctgggcatcaaggacaaggaccgggtcgaaatacgctcccggcgcggccacgccgtgctgcctgccgtggtcaccgaccgcgtgcagccgggcaactgttttgcgccgttccactggaacgacgtgttcggcgaacacctggcgatcaacgcggtgacccatgatgcggtggacccgatttccctgcagccggagttcaagtgctgcgccgtcgccctcagccgcgtggagctgatcgaccaccagttcctcgaccgcccttcccccgtagcagaggacaccgccatgtcgcgcctcgacgccttcgctgacatcaatggcatccgtcacctatcgccaccggccctgagcgacgacgaacgcacctacctcgccggtttcctcagcggcctgcacaccagcgccgcacgccagggctttggcgtaccgaccctgccggcaactgcaccgctggcggatgccgctcgcctctggctgaacggcttgcttgccggcttgttcagtcctgcagaatccctcgcggcgccctccccggcggtcaccctgctgtgggcctcgcagaccggtaatgccgaagccttggccgagcgctttgccaagcgcctgcgcgaaacaggcatcaccgtggaactgagcgcgatggcggacttccccgcgagcaagctggcaagcactcacaccctggcgctgatcagcagtacctttggcgacggcgacccgcccgacaacggcgaaggtttctggcacagcctgcgcaccgccgagacccgcctggagtcgttgcgttttgcggtattggccttgggcgatccgaactacgaccagttctgcaaccacggcaagcaactcgaccggcgcctgctggaactgggggcaacccgcctgctggaacgggtggactgcgacactgaattcgaagccgccgccgatgcctggctggcgcggttccagcagaccctcaacccggcaaagccgatggcaccggccacccccgccggtaaaaccaagctgtacggctcacgcctgttgctcaaccgccacctcaacccgcacagcgcgcacaaggaaacccgccagttcgccctagacctggccgactccggcctgacctatgaagccggggatgccctgggcatacggccacgcaactgccccgaactagtcagcgaactgctcgacctcacccgcctgagcgccaacgccagcgtgaacatcgacaccttcggcgatgtgccgttgcaacaggctctcacccagcattttgaaatcgcccggcccagcagcgacaccctggccttcatcgccgagcgcagcgccgacccaggcctcaagcacttgctcaagcccgagcacaaggccgaactcaatgactggctgtggggccggcaactggcggacgtgctgcaggaataccccatcgaatgctcggcggatgaattgctaggcaccctcaagcgcctgcaaccacgcttgtactccatcgcctccagcgccaaggcctacccgcaggaggtgcacctcaccgtggccgccgtgcgctatggcaagcgcaaaggcgtgtcgtcgaccttcctcgccgaccgcgccggtgacggggaagtgccgctgttcgtgcagccgtcgaaacacttccgcacgcccagcgacggcgaggtgccgatgatcatgatcggccccggtactggcatcgcgccgttccgtgggttcttgcaggagcgccgggcgctgggtcatcaggggcgcaactggctgttcttcggcgaacagcatgccgccagcgacttctattaccaggacgagttgcaaggtatgcagcgcgatggcctgctcacccacctgagcctggcgttctcccgcgatcagacgcagaagatctatgtgcaagaccgcatccgcgaacagggtgccgagctatggcgctggctacaggagggcgccaggctgtacatctgcggcgatgccagccacatggccaaagacgtcgaccaggccttgcgccagatcgcgcaaacccacggcgggcttggcgtggaaggcgccgtggagtactggcggcagttgagcgaacagaagcgttatctgcgtgatgtgtactgattggatacagaacaatatgcactttgtattgtgtacaaaaaaccctaaagatttaccggtaccgggccgaaacagcagtgatagcaaatcgcctgaatcctgatcagggaacgcagcgatttggccgcccttcacgctgatggtcgtctcgatgaaaataaaaaataagctggtcctcgcatttgtctccgttgcatttattccggtaagcctggtggccgtgatttcggtcatgaacacacggacccaggcggtggatcagttcatcgatggcagtacccgggagatccgccagatcgatggcaacattcgccagttcttcgatggcacgttgcaaaacgtcgatcagatggcaacggatcctgtatacacgtctgtcagcacgctaaagaactaccaggccgccgatgccgccagccagccgctgccggccgaggcgcaagcggtgatcgagcgcttcgcgcgcttcggcgccacgcacccggcggcggcgatcctgtccatcggcctggaagacggcacctacgccaaatggccggatgacccgcaactggccaagtacgacccgcgcacccgcccctggtacaaggcggccatggccagccccggcaagaccgtgcgcaccccggcttattactatgacaaggacgatgtagcactggtgggcaccgcccgggcgatgctggagaacggcaaggccaagggcgtgttcgtggtcagcgtgtcgctgaaaaacctcaccgaactggtcaagagcatcaagctgggcgaaagcggctacgtaatgctgatcgaagacggcgtggtgctggtggacccgcgtgacgctgcccacagcttcaagccgctcaaggacctgggggcgccgtatgcgcaattggccgacacgccccaaggctccaccgaggtggtgatcgacggcgtacgctacatggccaacgtgtggacctcccccggcctcggctggcgctacatcggcctgatcgaacaccgcgaagtcatggctgaagccacgcgcatgacctacctcaccgcgatcatcgtcggcgtgctggtgctgatcttcgggctgatcgcggcggcgttctccaaggtcatcgtcaagcccatcggccaggtcagcaccgggttgcagtccatcgcccagggcgaaggtgacttgcgccacgaactgcacgtacagggcaaggatgaaaccgccgaactggccggctggttcaacaagttcctcgcggcgatccgccaactgatccagcacatcggcgcagcctcggccaatttgcacaacgcctccaaggtcaacagcgaggtggcgcacaacatgaacgaggcggccgggcgccagcgtgaagcggttgaattggtgtcgaccgcgttcaacgaaatggtcgctaccgccaacgaagtcgcgcgttcctgcagcggcgccgcggagtccgccgagaatggccaccgtcgcgtggccgaaggcaagcagcagatcgaagtcaccaccgacaacgtcaaccgcctggggcgccgactcaccgagtcgtcccaggccatggtcgaactggaagccggcagccgtagcatcaaccagatcctcggcaccatccgtgcgattgccgaacagaccaacctgttggccctcaacgccgcgatcgaggctgcccgtgccggcgaccagggccgtggcttcgccgtggtggccgatgaagtgcgcgccctggccaagcgcacctccgactccaccggtgagatcgagcaactgctcggcaccctggaaaacaagacccaggaagtcacccagaagatgggcagttgcctggacctgtcgcgggccagcgtgtcgtccatcgaaagtgcgcgggacagctttgaaggtatccagacgtcggtgaacgagatccgcgaccagaacctgcagatctccgccgccgccgaggaacaacacagcgtggccgaagagatcaaccggcatatccagcagatctacgacgaggcgcgcctggtagagagcctggccaactcggcgcaggacgactcggggcgcttgtcgacgctgtcggatgaactcaatggcttggtggggcgcttcaagtcctgaggaagtcggcgatctggcgccacatggcaaacgctcagatgcgcgattgcgccgggctcatgggtgatgcctctcgatcaccaggccttcagcctcgctcggcacactgaaatggcgggtaatcagatcaaactcagcatcagtggcggcaaagtcgtgctcaccctgagcgttgcgcgcatgcagcctggcccgacaggtggcgtcatccagctccaggtagtgcaggcagtgccgggccttggcggcgtgtgccaaccccagcagccattcgcgactggccactgtattggcggggaaatccagcaccacgttgaggcccgactgcagcacattgatcaccaaggggcccagtacgccgcgaatgcgctgggtgcatttgatgtaatccgcaatggcgtggatttcaccggggtaaagcgtggcgagccagtggtcttcgctgagcacaatggcagcgtgctcagtggcgagggtcttggcgagcgtggacttgccggaggcgatcttgccgcagagcaaatgcagggtgggcatggggcggttccttatgtcagtcccgccagcatgaccgccatggattgatcacacaacgccccgtttccaatgctcgtagaacgccagggccgcgacgttcttgtccttggcttcgagcatgatgtcgaagcggtcgagaaactgcagcgcataatcgttggtccagcggttccacatctgtgcgctgtgggcgtacaggtcgcgcttggacaccacctgcaacagcgcgtccatttccagcttgtgttcggcgtcgaagcccagttcctgcagactctcctggggttgggagtagtgcatggtcgggcgcacgccacgccagctttcaatcacccgggcgacccgctcggagtgggggtcgatgtagtcgttctcgttgatccagcagtggtggatgtccaggaccaccggtgccaggtcggcgacttgcaggcaatggtccaggccataggtcttttcgtcgttctcgaacgtgatgcagttgcgcgccacctccgacaggcgcgaccacacggcgcgggtgccttccacaccgagacggccggcgatatgcacgttgcacttgaggtcttggaagcgccggccatagcccatcatgcggatcatgtcggcgtggtattcgaattcggcgaggctgttttccaccacgccggggttttccgaaccgagtacacagtattggccagggtggaatgacaggcggatatccgaggcgcgggccagctcgccgatggcggcaaacccctctatcaattgacgctcgatagccgggtcttggtagacgctggccactttggggtggctgtagaacggcaacagatcgctgctcaagcgcaacatgcgcaagggcgacggcagttcggcgacatacgccaacaagcgtaattgggcggccaggttatgcgtgaccacttccaccagtttgtcccgggccacctgcggtgtgacgctgtccatccaccgcaacgtggtggtgcgtgggttgaacgggccttcgatcagcttctgggcgctggccgacaacagccgttcgggatgtttgtattggcacgcgaagccaatgcgagggtgagtcatggaggcgcctggcgtaggaaaaaggagcgaatgatacggggttagtccggggtctacccagcgcggttcccattatttctaaacgtttcacgctgaactttctcaccggcgctgcgttcacttcttatgcgctgccccgtccaggggcgttgtacaacaaggagccgctcccgtatgactaccctccccgcctaccgctacgcccccgggccgctgcatgcgaccttgctcgccggcaccgtgccgttgtttctcggagccttgctcagcgacattgcctacacccagacctaccagattcagtgggccaacttcgcctcctggctgatcgccggtgcgttggtgttcgccggtttcgcgtttctgttcgcgctggtcaacctgctgcgtgccgagcgcaaggccgggcaacccacgcgttatgtgctgttgctgttggccacctgggtactcggcctggtcaatgctttccagcatgccaaggacgcctacgcctcgatgcccggcggtctgatcctgtcggctattgtcttgctgttgaccctggccgccacctggaccggcctgcgtgcgggaggtgtcaaatgaaaacgtccaacacattgacgctattgagcaccgccctgctgctgaccgcctgcggtggtgaaggcgacaagacccaggcccgtggccccgaccccaagttgccggaacagcaaagcagcctgttgccgagcatgaagatcgccgagcccgcgccctggggcgaacagaaacccaaggtgccggacggctacagcatcaccgcgattgccaccgacctggcgatcccgcgccagaccctggtgctgcccaacggcgacatcctggttgccgaaggccgtggcggcagtgcggccaagctcaagcccaaggatgtgatcgccagcctgatcaaggccgagggcaacaccaaggtcaagagcggcaaccgcctgaccctgctgcgcgacgccgatggcgacggcaactacgaactcaagaccgtgttcgccgacaacctcaatgcgccctacggcctggcgtttgccaacggcaaactctatgtggccaaccaagacgcactggtgagcttcgactacgccgatggccagaccaaagccagcgggccgccgagcacagtcaccgccctgccggcacagatcaaccatcactggaccaaatccctggccgtaagcgccgatggcaggcagctgtacgtgggtatcggctccaacagcaacgtcaccgaacgcggcatggaagtggagatcgaccgcgcaatggtctggcagatcgacgccgccaccggtgcgcacaagccctacgccaccggcctgcgcaaccccacggcactgaccatccagccggacaccgggcaactgtggacagtggtcaacgagcgcgacgaactcggcccggacctggtaccggactacttgacctcggtgcgtgaaggcgcgttctacggttggccctacagctactggggccagaacgtcgacccgcgcgcccagccgcaaaacccggccaaggtggccgccgcgatcaagccggactacagcctgggctcccacgtggccgccctcggcgtggacttttccatcccgcagatgggcgagcagtttgccgatggcgtattcgtcggcgagcacggcagctggaaccgcgacaacccggtgggctacaaggtgatcttcgtgccgttcagcaatggcaagccgtccggtgagcccatcgacttcgccaccggctttcgcggcgacgacggcaagacccgtgggcgcccggtgggtgtgacggtggacccgaaaggtgcgctgatcatcgccgatgacctggccaataccgtttggcgcgtaacgcgaaaccgttaaacaaaatgtttgacatgattgccttaggcaacaatattgttgcctaaggcaaccattcgagcatttcaacatgtccacccccttgcttgtcgaacgcgccggcatcgtgcgcggcttcaatcgcttctacacccaccagatcggcgtgttgcaggaacacctgctgcaaagcgattactccctcaccgaaatccgcgtgatgtacgagttgtcctcccgaggtgatctcaccagcgccgacctgtgccagatgctcggcctcgacgcgggttacctgagccgcctgaccagtggttttgaaaagaaaggcctgatccagaaagtccgctgcgccaccgacgcacgcgccgtgcaattgcacctcaccgaccacggccgcgccgtgctggcgccgctggagcagcaaacccagcgcgaagtcatcgcccttctcgacagcctccccgagccacaacagcagcagctcaccgcagccatgaaacgcatccaggccctgctgcaaggcacggcgcccagctacctgctacgcgacccgcaacccggcgacatgggcgtggtggtgcagcagcaaaccgcgatctacgcccgtgaatacggctggaactgggagttcgaagcgctggtggcggagattgtcgccaagtacttgcgcgagtttgatcagacctgcgagcgttgctggatcgcggaaaaggacggtgaggtggtgggctcggtgttcgtgatccgccatgaccagaccacggccaagctgcgcatgctctacgtggatgccagcgcacggggcatgggtatcggccagcgcctggtggatgaatgcgtacgctttgcccgccaggtgggctacacacgcatgctgctgtggacggtggacatcctcaccgacgcgcgcaagctgtatcagaaagccgggttcgagttgatagaggaagagccgatggtcagcttcggtaaaaccctggtcagccagacctgggctcgccagctgtgaaacagtcccgcgccagggcggcgcgggacatgacgccttacaggtcagtgatttccttgtggcgcggcaccagcgttttcatcacgctccaggccaccaggtaggccagcgcacagatcgcgaacatgatcatgtagccggtatggatgtcgttgatggacttgtagtagtcgaacacccagccgccgatcttggtcatcaccacgccacccaggccgccggccatgccgccgataccgaccaccgaggccacggtcttctgcgggaacatgtcggacaccgtggtgaagatgttgcacgaccacgcctggtgcgccgaggcgcccacaccgatgagcattaccggcacccagaagctgatatagcccaacggttgcgccagcaagaccaccagcgggaacaacgcaatcaccagcatggctttcatgcggccgtcatagggtgcatcgccgcgcgccatgaagtagctggggaaccagccgccaccgatgctgccgaccatggtcatgctgtacagcaccgccagcggcatgacgatatccgcgcctttcatgccgtactgcgctgacaggtaggtgggcagccagaacaggaagaaccaccacacgccatcggtcatgaacttgccgaaggcaaaggcccaggtctggcgataggtgagcaacttgagccatgagacctttttctccacggcgctggccgctaccggggtgaagggctgcacggtctggtcgctgcggatataggccagttctgcggccgacaggcgtttttgctcctccggctttcggtagagcgcgatccacaccgcgacccacacgaacccgagcccgccgattacgataaacgccgcttcccagccccacagaccggcaatcaaaggcacgcagatcggcgccaggatcgcgcccacgttggcgccggagttgaagataccggtggccagcgagcgttctttcttggggaaatactcggcggtggccttgatcgcaatcgggaagttgcccgcctcgccaatcgccagcaccgcacgggacagcatgaagccagcaatcgacaccgggatcaccgccaggccaatcgcaccgctgatggcggcgatgccctcgcccatcggcaccgagaacgcatgcatgatggcgcccgtggaccagataccaatcgccaccacataggccgccttggtgccgatcttgtcgacaaagcgcccggcgaacagcatcgagatcgcatagacaaactggaacaccgccgcaatgttcgcgtagtcggtgttgctccagccaaattgcgtggacagctgcggcgcaagcaggctgagcacctggcggtcgaggtagttgacggtcgttgcgaagaacagcatcgcgcagatggtccagcgatagttgcctaccgcttggccaacgcggtgcgcgtggatgggctcgttcaagttcatggcatcactttttatttttgttaggtaggacatatgtaacgtcatatgtcgtcgtacaactgcgacttttatatccggccgcctaccggctgtcaatctgaaagattgccgtttatcgaggtattgcgagggtcattgaaaggtcaggtctatgcagttgtaggatgacaaatgcgcatgaccaggctgggcgccttgccccgtacatcgtcgagcacgccaaacggctgcatgccgatcttttccagcacccggatcgaggccccgtgatccggtcgcaccagcccgaacacctcgggcaaccccaggctgtcgaatgccagcgccaacgcgtcatgccccaactcggtggcatagccctgcccccaggcttccaccgcaaagcggtaacccaggttgatgcgccgctcggtcaggtagtcgaggggcgcgataccgccgaagccgatgatgtggtccggcgcctcgcgccgtgcaatcgcccaccagccgtacccttgggtcacccactgtacgagccagtgatccagcaggcgttgcgccacctccaggctggccatggggccagacgggttgaacaaattggtctgcgggtcgccgaagatcgcgaacaatcgctgcaggtcgttcgcttgtggttggcgataggtcaggcgtgagccggcggacatgcggattactcctctgtggctgtagtgagcgggcttgccccgcgctggggcgcgaagcggccctaacaccaagcaccgcattttgtctgaagaaatgcggtgattacattggggtggctgcgccacccagcgcggggcaagcccgctcaccacaacaggtccgctcaccactaagcccgctcaccgcaaagaatgcaaaaaaagcaaaatacgggtgaattatttcatgtccacttgtatctgaagtgacagagcggtgccatcgcagtgatggcgcctcccctgttctgctttagagtgccccgcatgaaattacgtaagaaaagcgtcaagcccatcggattgaaagacatcaccatcgtcgacgacaccaaggtgcgcaaggcgattaccgccgccgccctgggtaatgccatggaatggttcgactttggcgtctacggttttgtcgcctatgtgctgggcaaagtgttcttccccgacgcctcacccagcgtacaaatgatcgctgcactcggcaccttctcggtgccgttcctgatccgccctctgggtggcctgttctttggtgcactgggcgataaatacgggcggcaaaaggtcctggccgcgaccatcgtgatcatgtccctgagcaccttcgccatcggcctgatcccctcctacgcctcgattggcatctgggcgccgatcctgctgctgctgtgcaaaatggcccagggcttctcggtgggtggcgaatacaccggtgcgtcgatcttcgtcgcagaatatgcgccggaccgcaagcgcggcttcctcggcagctggctggacttcggctccatcgccggcttcgtgctgggcgccggcgtggtggtgctgatttccagcatcctgggcgaagccgacttcgagtcgtggggctggcgcctgccgttcttccttgccctgcccctgggtatcatcggcctgtacctgcgtcacgccctggaggaaaccccggcgttccagcagcacatggacaaaatggaacaaggcgaccgcgaaggcctcacccacggccccaaagtctcgttcaaggaggtcgcgaccaagcactggcgcagcctgctgacctgcatcggtatcgtcgcagccaccaacgtgacctattacatgctgctcacctacatgccgagctacctgtcccataacctgcactacaaagaaaacagcggcgtgctgatcatcatcgcgatcatggtcggcatgctgttcgtgcagccgttcatcggttttgtcagcgacaagatcggccgcaagccgttcatcatcgccggcagcatcggcctgctgttcctgtccattcccgcctttatgctgatcaccagtggcaaaatcgggctgatcttcgccgggctgctgatcctcgcggtgatcctcaacttctttatcggcgttatggcctcgaccctcccggcgatgttcccgacccacttgcgctacagtgcattagccagcgcgttcaatgtctcggtattgatcgccggcgttacgccgaccgccgtggcctggctggtggaaagcaccaacgacctgtacatgccggcctactacctgatggtgtttgccgtggtcggcctggtcaccggcctgaccatgaaggaaaccgccaacaagccattgcgtggcgccgcaccggcggcgtcggacatggaagaagccaaggagttgttgcaggaacatcacgacaatatcgagcagaagatcgaagacatcgacgccgagattgccgaactggaagccaagcgtcagaacctggtgcagcagcatccgcgtatcaactaaggcctgaccctgcatggcggccccagccgccgccatgcttttggagagttcaaccatggttccaagcgtcaccgcaccacagtcgttgctcagcgcagatgaacgcgccgccatcgccgaaatagaagccaccaccagcatcctgcaactggtcacccgcctgaccggcatgcgcttcgccggcatcgccaaattcaccgacctggaatgggtggtctgctctgtgcacgacaccgtcgacatgggcattcacgtcgacgacgtactcgacctggaaaccacgctgtgcagcgagttctgcatcaacccacagaccctgttcatcccgcagatcagccagagcggccgcttcgccgcgcgcccggtggtcaagcaattcgccatcgaaagctacgctggtgcaccgatcttcctgcccgacggccgtctgttcggcgcactgtgcgcgctggattcacgggcgatgctgttcgaagaccccaacctgccggaaaccctgagcctgtttgcgcggctgatcgggtgcattttctttgccaacctgacgccccgtgacacctgatcgttcagcttttcaagcgcgctgccgatagcctgggatacccctgacttgcagcgctgccctgcgggaaacaatgccgaacactctcgccccgatcgtccgtacgctctccaaccgcaccagtctgtcgctgacacgtacctccctgttcaatttcacggccctgttggtcctggtctttgcagcggcagcttattcgctgatctacctggcccatgaactggaccacgccgagcaagaggaaagcgcgttttacacgcgtaaagccgtgcagtccctggaaaaatccttgcgggtcaccgtcaaggactacgccttctggagcgacgcgtacaagcacttgcacctcaaggtggacaccgattgggcctacggtcgcggcaacatcggcgccacactgttccaggatttcggcttccagggcctgttcgtggtcaacgatgccaaccgcacggtgtacgccgtcgtcgaaggccaactgcaacccattgacctaagcgactggcttgcccagcccatcacgcacgtgctggaacaggcacgcgccggggctgagcaggagctgccggtcaccgcttttatcaacgtgcatggcagcccggcacttgtggctgcagccgccatcacgccaggcaccgaccccacggtgaagatggatgggcgccccgcatcggtactggtgtttgtcgacatcctcgacagcgcccaactggccctgatcggcaatgatttcggcgtcaatcaactgcatatcgccagcgccgatgagatcggcaagaccttgctggttcctctgggcgacaacggtgctgccggcagcctgcattggcagccagcgcgcccgggtgtgcggttgatgggcgtgggcttgccgctgctgggcctggccgcgttgctggtatgcctgatgacctgggtgatcctgcgccgcgccagcgccgccgccctcgccctggatgccagccacgcatcgctgcaagacagccaggacgcgctgaccaccagtgaagcgcgctttcgcgatgtggtggaagccagctccgactgggtctgggaaatcgatgccggctggcgcttcacctacttgtcggagcgcttcgagaacgtgaccggcctggcccgccgtgcatggatcggcgccgccatcaacgacctcctggacaccgaagccggcgcgctttcgcaatggctgaacacccccagccgcaccgcggacatcagcgtgcagtgccgctatgtcgacgcccacggccaggaacgcaccacacggcttgccgcgaggcaaatgccctgtggcggcttccgtggaaccgccaccgacgtgacggaggaagtcgaggcccggcgccgcatcgaattcctgtccgaacacgacgccctcaccgggttggccaaccgcacacgcctgcaagcgttcctcgacgacaagctcaaggcgctgccagcgtcgggccaaccgttggtcatgctcagcctggacctggaccgcttcaaaccggtcaacgatctgctcgggcacgcagccggcgaccacgtgctcaacgaagtgtcgacccgcctggccgattgcgtgcgccacggcgacctggtggcacgggtgggcggcgatgagtttgtgttgatcctcacgaatgcgggcacccaggacgatgtcgagtccctgtgcctgcgcttgatcgagtccgtcgaacaggcggtcagggtcggcgagcaggaagtgttcgtcagcgcgagcatcggcatcgtgctggcccccgatgatgccagcgaagtcgccgaactgctgcgttatgccgatatcgcgctgtacgaagccaaggcggccggccgcaatacctggcggttttactcgggggagatgaatgcacggatcatcgagcgtcgccgcctggaaagcgacctgcgttttgcaatcaagcacaatgaactgcgcctgcacttccagccgcgctatcgcattgccgatggacagatggtcggtgccgaagccctggtgcgctggcaacacccacagcgcgggctgatttcacccgagaccttcatcccgattgccgaagagtccgggctgatcctggcgctgagtgactgggtgctgcaaaccgcctgcaccagcgccgcccagtggcccgaggcattgtttgtgtcggtgaacctgtcgtccacggagttcaagcgtggcgacctggtggagcgcattcgcaatgccctcacggcgtcggggatcgagccggcgcgggtcgaactggaaatcaccgaaagcgtgatgctcgaagacgcggcgggcgcactggcggtgatgcacacgctcaaacgcctgggcatacgcattgccatggatgacttcggcaccggctattcctcgttgagctatctgcgggccttccccttcgacgggttgaagatcgaccgcagcttcctcagccgcctcgaagacagtgaggatgacaaggcgatcatccaggccatcgtcggcctggggcgtgccctggcattgacggtgaccgccgagggcatcgagaccgccgggcacctggcaatgctccgggccgtgtcctgcgatgaaggccagggctattacctcagccggccactggatatcgacacgttcaacgggctgctcggcactagcggaaaaactgactcggcgtcttgccaaactgtttcctgaacatgctggtaaacgcactcgggctgtcgtaacccagctccagggcgatatcgatcaccttctcgcccaccgcaatgcgttccagcgccagcagcaaacgtgcctgttggcgccattggccgaaggtcatgccggtttccttgcggaacaggcgctggatggttttctggtccaagtgcaggcgttcgctccagtgcgccacggtggaggcgtcgcccggctcttcctgcaacgccaggcagatgcgctgcaggcgcgggtcggcgggctgcggcaaggacagcggcaacgccggcaggatcgccagttcgtcgaggatcaggtgcatgatccgcgcatcccgtgagtcttcggcgtacggcggcttcaggctcacggacgccttgatcagctcgctcagcaacggcgagatactcacggttttcggctcgccgggcatattcgggaagcgatccgggcgcacaaacacgctgcgcattttcagggtgcctacgcaacgcagggaatgcacttgcccggcgggcatccagatgccacggttgggcggcacggtccactggttcagcgccgagtacaccaccatcacgccttcgatggcgtagagcagttgatgcttctcgtggctgtggtcggggatcacccagttttccgggtaatcggtggcggaactgatgacggcccaggcgccttcgttgatttcctgaagaaattcatccagtggtttgatcatttcgcccttttcgcgatagttgccgccccaattgcgtgagacaggcattcctgacaaatctagcatgaacgccgaatcattttgtaatggatggcgaccttaagaagttgccgcctctgattagctgccttgtatggaatgcctgcatgtcgacccttaccgcgtcacccgccgctgcaaccactacgccccaggccagccccttggtcatgcgcatcctcggcgcctgcgccctggcccacttgatcaatgacctgatccaggccgtgctgccgtcgatctacccgatgctcaaggccaactatggcctgacattcacccaggtcggcctgattaccctgaccttccagttgaccgcctccctgctgcagccgtggatcggctatcacaccgaccgccaccccaaaccctggctgctgccggcgggcatggtgtgcaccctgatcggcatcctgatgctggcgtttgtcggcagcttcccggcgatcctgctggcggcgggcttggtgggcgtgggttcgtcgaccttccacccggaaacctcccgcgttgcgcgcctggcctccggcggtcgctacggcctggcgcagtcgaccttccaggtcggcggcaacaccggcagcgccttgggcccgttgctcgccgcggcgatcatcatcccctacggccagggccatatcgcctggttcgggctgtttgccgtgttcgccatcctggtgctgtacggcttgagccgctggtaccgccaccacctcaacctgttcaagctcaagcaaggcggcaaagccacccacggtttgtccaagggccgcgtgacctttgccctggtggtgctggccgtactggtgttctccaaatactggtacatgaccagcctgaccagctacttcaccttctacctgatcgagaagttccagctgtcagtcgcaagctcgcagatgtacttgttcctgttcctcggcgcagtggccgtcggcacctttgccggtggcccgatcggcgacaagatcggccgcaagaaagtcatctggttctcgatcctcggcgcggcgccgttcaccctggccctgccctacgtcgacctgttctggacggcggtactcagcgtggtgatcgggttcatcatcgcgtcggccttctcggccatcgtggtgtatgcccaggaactggtgcccggcaacgtgggcatgatcgccgggatcttcttcggcctgatgttcggcttcagcgggattggcgcggcgctgctcggcctgctggcggacacccacggcatcgagtacgtctacacactgtgttcgttcctgccgctggtgggcatcctgacgatcctgctgccctcgaccaagggcgcctgacctgccgatcatcgcctggccgtgtgctatcacccggaatgctctgaaaaacctgcgtgtgcgcttacaatcccggttctaaacgcacaccaggcagacccggcaagacatgacgctcgaccctcccacgattttggcactcaccgttgccctggcagccgctgccgccctgtacctggccgttgaatggcgcagcgtgcgcgaaccttcgctgctgtgctggagcgccggtttcgccaccattaccgtcggttccaccctcgccctgctgcgcctcaatggctacctgatgatcggcatctggttcgccaacggcttgctggtgaccgcgcacttcctgtttttgctcggcgtggcgcggttcacccaaacgcggctgtcgcccatgtggttgctgatgctgctggtctggctgggcatgctgatgttgccggccgatccgtcatggtccaaagccatgctggcggtgcagtccctgttagtagcgctaccgaccctgcgcgccagctttttgctgcggccccatggcaagtcgctgagcatcggcgcggtgcagttgcgctacgtgctgctgatccatggcgcgttctatgtggccaaggcgctgtcggtattgatccccggcaccttgatcgacctcgccgccttcaagggcgagatcatccagatttccctggtggaaggcgccatggcgatcatgctcatcgcactgtcgatgaccggctccgagcgctatcgtcgcgaacaacagatcgcccgcctcgccgcccgcgacccgctcaccgccctctacaaccgccgcgccctcgacctgcgcgccccgcgcctgctcgctcaggtaacgcccgcacaaccgggcgccctgctgctgatcgacatcgacaacttcaaatcggtcaacgaccttcacggccacactgccggcgaccgtctgctgatcgccctcagcgaaatgatccgcagcgtagtgccccaaggcgcgctggccgcacgcctgggcggggatgaattcgtgatcctgctcaacccggcgtccaccgaacagatcgtcgaactgggcagcagcctgcgcgaccagttccagcaactggccgcgcagagcttcaccacgccggcgccggtgacgctgagcattggcgcaaacctgttcgaccaaccgccgccgagtttgacggcgctgatcgagcaaggggataccacgctgtatgaaaccaagcgcggtgggcgggacagtattcggttggtggatcggacggggtcgagttcgtacggctaaaggtcgtaactcaccgccacactgcgcccggtcctcaccgactccaacgcacactccgccaaatgcaacgcatacaacccatcccgcacgctggtgggcaatgccgtgccgttattcagcgcatcgatgaactgcgccagctcattgcgatacgcatccgcataccgttccaggaaaaagtgctgcaacggttccagcgcctcggtgtgttccgcgctccagtggcgcagggtgctggggcggtggttgtcggtgagcagcacgccggtggcgccggagacttcgacgcgctggtcgtagccgtacaccgcctggcggcagcagttgatatggcattgcttgccggaggcggtgcgcagcagcaccatcacgctgtcgtagtcgtcgatttcggccaggctcgggtcgaccaggcggctggcgatggcgctgacttccaccggctcttcgccgagcaggtggcgggcggtgtcgaaatcgtggatggtcatgtcgcgcaggatgccaccggagtgggccaggtagtcacgcggcgccaggccggggtcgcggctggtgatgatgacttggcgcaccgcgccgatctgcccggcgtcgagggccgcgcgcaggcgcagcatgtcggggtcgaaacggcggttgaaaccgagcatcacgcgaccgccctggcgctccaccgcctgggcagcactgcgggccttggcgatatcaaggtcgatgggcttttcgcagagcaccgccttgcctgcggcgacggctgccagcagcaggtcgatatgcgtgtcggtaggcgtaccgatcaccacggcgtcgatgtcattacgggtgagtacggcggcgcaatcgtaggccgcctcgcaccccagttgggcactcaacgcatcgacgccttcgcgccaggggtcagccaccagcaccagcgtggcattgggatgggcggcgacattggcggcgtggatcctggcgatgcgcccggcacccaggacggcgattctcagcatggtcgaactcctgatgttgttattgagggagtaatcagtcgggcaggttgaacggcgtgacgatctgcacctgggacggtgcaatcggcccggccttccagagccggtggtagtgcaggatgtgcaggaacacgtggcgggcatcgatctgcaggttgtgatcgataatcgcggcgaccttttcttcgcgcagcaactggcggttttcttcgtcgaggtcgtggccgatgaacacctcaaggggccgatcgaaggcggcgaacgcatcgacaatcgcgcggttgccgccgccgacgctgtacaccgccttgagctcgggatgctgttgcaacgcctgggtcacccgctcgaaggtgcggtcgtacacgccgtagccgccactgacgtcgagcacccgcaagtgcgccgcacgcccacgcagccaggcccgaaagcccatctcacgctcttcttcaccacggaacagttcgctgccgatcaccacggccacgtcctgaggctgcgccggcagccaacgcgacatcaggtaggcggcagtctggccggcggtgcggttgtccatgccgacgtagccgatgcgctcgctttgcggcaggtccgtgaccagcgtcaccaccggaatccccgccgcgatcagttgcttgaccgccaggttcaccgccggctcatcggcagccttgagcaccacgccctggctgccggtgtccaggcagcgcagcagttggtcgtgcatggcctggggttcgatctcttcaaacaggtgaaagcgcggggcaatgcggaacggcgccaggctgcccagttgcgcgttgatcgccgtctgtaccgccgtactgaagcgcttgggcgtgtgcatgatcacatcgacgtggaacgtgcgccctaccgccaggccgtttttctcctgggactccagctcctccagcgcctgctcgatacgccgccgggtctgggcatgcacgctgccgcgctgatgcagcacgcggtcgaccgtagctttgctcacaccggcctgggtcgccagttgcttgatggagaagtgtttggcgcgttcgagcatggggcctcacttgaggtatttttgaggtgttttttgggtattactgaggttttgcaatgctagtctcagttttgtccggcgtcgagccgggcgatgaacaacaacaaaagttccgggagaactgcatgcctaacaccgatctcgccacgtcgttcagcggccaatattttgtcgtcaccggcagcacccagggcctgggcgcggcggtggcccgtaccctggcaagccgtggcgccgccgggctgatcatctgcgggcgtcggcgcgcccagggcgaagagcaggtgcggctgttggcccaactggattgccaagcgatatttgtcgaggcggacctggagaaggtcgaggactgccgcgcaatcatcgatgccgcgcgtatccatttcggcaccctgcatgggctggtcaactgcgccgggatgtcggatcgcggcaccatcctggatacctcccccgagctgtttgatcggctgatggcggtgaatgtgcgggcgccgtttttcctgatgcaggaagcactgaagctgatgatcagcaacggggtagaaggcgcggtggtgaacatccagagcgtcaccgggcatggcgggcaatccttcctgagcgcctatgccgcgtccaagggcgcgctggcgatcctcaccaagaacgtggcgttcagcgccctgcgcaatcgcatccgggtcaatggcctgaacatcggctggatggacacaccccacgaagatgacatccagcgccagtaccacggcgcccaggatggctggctggaaaaggccgaaagcgcgcagccgttcgggcgtctgctcaaacccgaagaagtggcgcgcagcgtggccttcctgctgtccagcgagtcgggaatgatgaccggctcggtgatcgacctggaacaaggcgtggtcggctgtaccgacggcggcagcccgcaaccgaatcaggcgctgggaggtgtgtgatgtcggcgttcgtgacggaacaggccgtgcgcctggcggacttcagcgagatctgtgcgcaacgcgtgagccgagaggattaccctctgtgcgctgaagttcagagcaatgtgccgatctatcaggcccacaccctgcgcaatagcgaccgcctggcggtgatgaatgaactgcaccgcctgttccgcgaggggcctggggtgatggtggtgcgccgggcctacgaagatctggaagtggtcgaccgccacagccaggtgttcgaggcgatcttcgcccaagaggcggcgcagggcgtggcagccgaccactttgccaaggccggcagcaacgggcgcatctggaattcattgcagaaagccgcgttgcactcgccggcgtcgtttgtggagtactacgccaacccgctgctggggttgatcgccgaagcgtggctggggccgagctaccaggtcacggcgcaggtcaacgtggtgcatcccgctggccaggcccagcaaccgcaccgtgattaccacctgggctttcagaccaatgatgtagtggagcgctttcccctgcccctgcacctgctgtcccagtacctgacgttgcaaggcgcggtggcgcactcggacatgccgctggaaaccggcccgacccagttgctgccgttttcccagcaatacgccctgggttacctggcgtggcggcgcccggagtttatcgactacttccagcagcacgccgtgcaactgccgctgcacaagggcgacctgttgttcttcaacccggcgctgttccatgccgccggcaccaaccgcacaaccgaccgccaacgcatggctaacctgttgcaggtttcctcggcgttcggcaaacccatggaagccctcgaccgcgaccgcatgatgctggcggtgtacccggcgttgctcgagaacaccgcactggatgcccaggccgtggcatcggtgattgcctgcactgccgacggttatgccttccccaccaacctcgacaccgacccgcccttgaagggcctggccccgcaaaccgcgcaacaactgatgcagcaagccctcgacgaacgctggccactcccggactttgccgctgccgtggagcagctgcgaaccaagcgtcaagcgtgaaccctctgtttcaacaacaacaaaaacaacggagcaccctcatgaagaagcaactccttgcgacactcctgaccctggcgataagcccctgggcgctggccgatatccgcatcggcgtgagcatcgcccaggtcgacgacgtcttcctcgcgcagatgcgtgactacatggccgcccacgccaggcaactgcccgacgtgaccctgcaattcgaagacgcccagggcgacgtggtgcgccagctcaaccaagtgcagaacttcaccgcccagggcatggacgcgattatcgtcaacccggtggacacggccgccacgcaaaagatgaccgccaatgcccagcaagccaagacgccgctggtgtacgtcaaccgccgcccggatgcccagcagttgccaccgggcgtggggtatgtgggctcggacgaggtcaaggccggtgaaatccagatgcgctacctggcgcaaaagatgggcggcaagggcaacctggcgatcatgctcgggttgctctccaacaacgccacgcacaatcggacgctgggggtgaagaccgtgctcaaggagtaccccgacatcaagatcgtcgaggaacagagcgcggaatggcagcgcagcaaagcgattgacctgatgaacaactggatcgtatccgggcgcaaaatcgacgcggtggcggcgaacgcggatgagatggcgatcggcgcggccatggcgatcagccaggcgggcatgcagccgggcaaggatatcctggtagccggcagcgacggtggggctgccgggctggatgcggtgaagaaaggccagttgctggtgacggtgtatcaggacaacaagggccaggccgtgggctcgattgacctggcagtgaagatggtgaagaaggagccgtacacggctgaactgaccattccctatcaacagatcacccaggacaactaccaggccttcctcaacccttgagccgaacgaacctgttgtggcgagcgggcttgccccgcgttgggctgcgaagcggcccctttcaaaaccgctgcggtgtttcagttgaaccgcgacatcagttattggggctgctgcgcagcccaacgcggggcaagcccgcttgccacaacaggccctctcaccagagggagtttgcctcaaccggtcttctcgctgaacggttcaagcccattcaccaccagataaagcaacggccccaccgacacaaacaccgccgtcagcacaaagtacggcaccaccgaaagtaccgaacgcccccgccgccgcgcatcccggtacatccacacgcacgccagcagcgccatcaaatacaggtcgatcaccacttgcgcggtgtccggtcgcgacatcaattcgcgcccgaacgccagcagcgactgctcggccgtcagcagcgtgaacagggtgtatgacgaaaacagcagcaaaccgaccagcgcaacacgggatcttttcatgggttgttccttggggtgatcaaggcccacgttagtgataaggttcggcccctcgcaatgacctcggaggtcatgattccgccatggacacccctgccaccgccggcgaacagctgcgccacttgcgccggcaagcccggctcagccagctcgacctggccctgatcaccggggtgtcccagcgccacctcagttgcctggaaaccggccgcgccaagccaagcccgggcaccttgcacaacctgctgacggcactggaggcaccgctggaccagcgcaaccgggtgttcctcgccgccggctacgccccgcgctatagcgccacgccactggcctcaccggcgatggccgcgattcgcgaagcggtcagccatgtgctgcacgccaacaaccccgcgccggccatcctgctggacagccagtggcaggtgttggcggcgaatgccagcaccgccgtgctgcttgaactggtgggcatcccgcccgattcagccgagggcttaaacctgctcaccacgctgttgcagtcgggcggcctcggcgatcacctgaccaatgccgacgagatccgcaccctggcctggcagcgcgccacccgtgaggcgctgggcaatcctgaactggccgccctgctggcgcgtttgccgacgccggccagcaccgagttgcccgccgacatgccgccgctggtactgacgcgcatccgttcaagccggggcgaattgagttttctgtccaccttcaccaccttcggcatgcctcaggacattaccctctcctccctgcgcatcgaacatctgattcccgccgacgacgccacctggcaggtgatgcgcgcggcctatgcgagttatgccgcgctggttttgtgaaatatctgtacgtagactgccgccatacccccacctgaaggcggcgaaaaaaacgtgatgcaagttaccgaagtctccattgcccaattgcgcgcggcgcttgaatccggccagaccacggccgttgaactggtaaaagcctacctggcgcggatcgaggcctatgacggtccgcacaccgccaccgccttgaacgccgtggtggtgcgcaaccccgcagcgctcgaagaagccgaggcgtccgatgcacgccgggacaacggcgaaaccctggggcctttggatggcattccctacaccgccaaggacagctacctggtcaagggcctgaccgcagcgtccggcagcccggcgtttgccgacctggtcgcccagcgcgatgcgttcaccatcgagcgcctgcgcgccggcggcgccatctgcctgggcaagaccaatatgccgccgatggccaatggcggcatgcagcgtggcgtgtatggccgggcggaaagcccgtataacgccgactacctgacggcgccgtttgcttccggctcatccaacggagccggcactgcaacggcggcgagctttgcggcgtttggcgtggccgaagaaacctggtccagcggacgcggcccggcgtccaacaatggcctgtgtgcctacaccccgtcccgtggggtgatttcggtgcgcggcaactggccgctcacgccgaccatggacgtggtggtgccgtacgcgcgcaccatggccgacctgctggaagtgctcgacgtggtggtggccgaagacccggacacccgtggcgacctgtggcgcctgcaaccctgggtgccgatcccgagcgtcacctcggtgcgcccggcgtcttatgctgacctggccgtgactgccgaatccctcgccggtaaacgctttggcgtgccacgcatgtacatcaatgccgaccccgacgccggcaccagcgaaaaacccgggatcggcggccccaccgggcagaagatcaacacccgcgccagcgttatcgacctgtggaacgacgcccgccaagcgttggtggcggccggcgccgaagtgatcgacgtggatttcccgctggtgtccaactgcgaaggcgaccgccccggcgcgcccactgtgtttacccgtgggctggtgtccaaggagttcctgcacgatgaactgtgggaactctcggcctgggccttcgatgatttcctgcgcgccaacaacgacccggcgctcaaccgcctggcggatgtggacgggccgaagatcttcccccacgacccgggcaccctgcccaatcgcgaagacgacctggccgccggcatggacgaatacgtgcgcatggccgagcgcggcatcaccccgtgggaccagatcagcaccctccccgacggcctgcgcggcctggaacaaacgcgccgggtcgacctggaagactggatggacaagcttggcctcgacgccgtgctgttccccaccgtggccgacgtaggcccggcggatgccgatgtgaacgaagcctccgccgacatcgcctggagcaacggcgtgtgggtggccaacggcaacctcgccatccgccacctgggcgtgccgaccgtcaccgtgcccatgggcgtgatggccgatatcggcatgccggtggggctcacctttgccgggcgcgcctatgatgactctgcgttgctgcggtttgcgtcggcgtatgagtcgaccggcagcaagcgcctggtgcccccgcgtacgccggcgctttaactcaaggcatgggcacggcaatcaacaggattgccgtgccatgggccagcgtcgccgccagcacgccataacgcatacgcaccagcgcgcaagccagcccttccagcagggtaaacagcaacaccggccaccccagttcagtcacgctcaaggccaggaaagcatggcaggccgcaaaagctacgccgctgatcagggccgcacgcaacggcgctacctgctgctccagatagccctgcaaaaacccacgaaacaacacctcctccaacgcattggcgccataggccaacacgaccatgcccggcagccatacccaataacccacaagcgctgacgcttcgatgccctggtacaaccgcagcggcacaccgatcaagccaccaaccgcgagcccgatcatcagtcccgcgacacgcggccccctggaccagacgatcagcgccgccaagtcaggtgccacccgcacaagcgccgtaatcaataacaccgataaaccacccaatgctgccagcaccaaggtgttggccgtgaaggcaagctgcacctcgctgcccagcgaccacaagcccaacggcgtcatcacatcgcgcatcagcacgaacgccatcaacagaatcaggatgcgcaacgccgtcagcgacttgggcgtgagcgcgaaccacaggccgaacaacagcagccccggtgccaggtacgtgctgtagtggatcaataccaccatgccttgggtaatcatcgatcgctcagccgtgcgccagcgcaatcatttcgatctccaccgccgccgacttcggcagctgcatcacgccaatcgaggtccgcgtatgcaccccggcgctgccgagaatctcgtgcaacaggtccgacgcgccgttggccacttcactctgctgatcaaaatcctcggcactgcgcacgtacacggtgatgcgcgggatggccttgatctggtccagcgaacccagggcctgctggagcaaccccaggcagcgcaacgcgctgatgccggcggcgacttgcgcctgggcgagggtcaggctgtcaccgaccttgcccggcagcacgatggcatcgccgacacgcgggatctggccgctgatgtacaggtggttgccatcgcggaccagcggcgtgtagttgccaccgatcttgaattcattcaactgatagccgatgcgcagctgggcggcctggtatttttcgtcgcgggtcatgggcgtgcatcctcgttgcgacgttgccactcatccaccacgtcgcccagggtcttgggcctatcgttgcgaatccaggccatgaagggccggtcgaacttgaaccctgggccgcagtgctcaagcatgaagcggcgaacgttctgagtgtttttgtagtggggggtgacgggggtgtcgcgggtgatggggtcgctgtgccagtcaaaatccatgttgtctctcgggcgccgtggggtttcggcgctagcatagcgatgtgctacctgcacaggaagtgagctgtgattcaactgatgtgttgagacatcgcacaagataaaggcttgcttatattgccttaaagcccagccctttcaaggtctttgaaaaaacggccatacctgcctgataccctcccatcaagggtgaacactacaactgtggcgagcgggcttgtcccgcgttgggctgcgaagcagccccagcaccagcggcctaagaatgcctggttcagcgcatttccccttccagggtcgcttcgcaacccaacgcggggcaagcccgctcgccacagaagactcatcgcctgttctatctgaagaccttgaaagggctgacctcagtgccgaaacttttctggatatttcaaaatttcactttccttccccctctgaaatattgcatggttgtacgacgacttaccccgtcgtgccagcccccaacaacaataaggaaacacccatgcaaaacgtcaaagtgctgatcggctttctgtgcctgttcagcggctatgtcgcagcagcgcctgcccctgccgaaaaggacgtggcccaagcggtcgaccaactgacccaggccatgctgcacctggacctcaagcaacttcacgcgctgacgtccgacaagctcacctacggtcactccagcggcaaggtgcagaacaaagaccaattcatcgctgacctggaaacccacaccagcgcgttcaagaccctggaaatgcagaaccagaccatcaccctgcaaggcgacactgcactggtgcgcaaccacttccacgctctggccgttaacagcggtgtagaagtgcccaccgatatcgacaacttccaggtctggcagaagcaaaaaggcaaatggctgctgatcggacgccaggcctacaagtactgatgcccagcggtgagccgctgaccccggctcaccacgccaccaccgtgcgcaccttcaacaacgcctcacgcagcgccggcagcgccaccgagcccaaggccaaacgcaacgcatgcggcacatgggtcgacacggcaaatggctcggcggtagacacggaaatgccctcgcgctgcaagctcatggccacctgatcggcccgcgcctcgtccgccaggggcaaccacaggaaatacgaagaaggatggctcacgtacgccagtcccttcagcacctgcgccgccaaggcctgccgcgcctgggcatcctggcgcttttgtgcttccagttgcgccaccgtgccatcctccagccaggccaccgcaatggcgctcatcacacccggcacgttccaggtggtggccatgagggtgcgctccagtggtttcacccattccatcggcgctgcgacaaacccgacccgcaacccggtcgcgacacttttcgacagcccgcccacatacaccgtgcgctccggtgccaatgtcgccagcggcggcggcgcgtcttcggccaggaacgcgtaggccgcgtcttcaatgattatcaggttgtgctgacgggcgatcgacaccaactgctcgcgctggctcatgcccatcacccagcccaatggattgtgcagggttggcatgctgtacaccgcgcgcaccgggcgcttgcgacacaggttgtgcagcgcgtccaggtccggccccaccggcgtgaccgggatcgcgacgatttccaggtgcagggtttcggccagcaccttgaaccccgaataggtcaaggcatccaccgcgatcacatcgccgggcttgagcaacgccatcagcgtcaccgccaggccgtgctgggcgccactgaccagcagcacctgctcggcgtccaccctgagcccgcgactgagtaagtgccgcgcaaccgccgcgcgctcatgcaagcggccggcatggggctggtaacgcaacagggcttcgaggtcgccgcagagcgccaactggcgcagcgccgtgcgcaacctatccgcctggccgggcaacgaagggtaattaaagttcaggtcgagcatgcccggcgccaccgtcatctgcccactgccctgccccggcggcagcgagatttcgcgcacgaaggtgccgcgcccggcttcaccgctgaccagccccatcccctcaagctccgcatacacccggctggcggtgactagggccaggccatgctcggcggccagttgccggtgggttggcagccgtgtgccgggcggcattgttccgctgcggatggcttgggcaaaggtatcgaccaacgacttgtagcgggcgcggggcattgggctgtatccatgacaattttttgattgtattaatcctcacctctaggatggctgcaacgcaacccctccttgtccggacgcctgatcatgcaacgcacctcctctcttgacaccctgaatggcagcgcccaaggctggatcaacggctttatgggcgtggtgatcttcagtggctccttgcccgccacacgcctggccgtaatggagttcgacccggtcttcctcaccatgattcgcgcggccatcgccgccctgctgggcgtactgctgctgtggctgttcaaggaaaaacgccccacacgccagcagtgggtgcccctggcaatcgtcgccctgggcgtggtgatcggcttcccgctgctcacggccctggccctgcaatacgtgacctcggcccactccatcgtgttcatcggcctgctgccgttggccactgcggtgtttggtgtgctgcgcggcggcgagcgtccgcgcccggtgttctggctgttttcgatcctgggcagtgggctggtgatgggttatgccttcgcccagggtttgagcgccgcaccggccggcgacttgctgatgctgttggcggtgctggtctgcggcctgggctatgccgaaggcgccaagctgtcgcgcagcctcggcggttggcaggtgatctgctgggcgttggtggtgtcaatgccggtggtggcgccgttgagcctggtgctggcgccgacaagtttgcacggcatcagcctgcccgcctggctcagcctgggctacgtggcgttgttcagcatgctgatcggttttgtgttctggtatcgcgggttggcccagggcgggatcgccgccgtcggccagttgcaattgctgcaacccttcttcggcctggcgctggcggcgggcctgctgcatgaacacgtcagcctgggcatgctgctggtcaccgtcgcggtgatcggctgcgtggccggtgcaaagcagtttgcccgctaacgctgcggcgcgaccatcttgaacttgatgttgatgtcattggacaccacgctgttgccggcccactcgccctcgccgatcctgaagtcgccgcgcttgaggatgaactcaccgtcgaacacaccaatgccgctctgctccttgagcaccacgtcgacgtccaccgggcgcgtggtgcccttgatggtcaggttaccgctgatctggtagcggttattccccaacgccttgaccccggtggattcatacacgcccaccgggtaggtcgcggtatcgaaccaggaggcgcgttgcagttcgtcgttggcatccgggctgccggcgtcgatgctggcgagctggatcttgagcaaggcatgcccggcttccggctgttgcgtatcgaaggtcaaggtgccctcgaagtcgctgaacgtgccatacacccgctgccccaattgcttgtaggtgaagctgatctggctggcggtgcggttgacgtccttgtactccaccgcctgggcgctggcgccgtaggcaaggatcaaggccaggacggcgaccggggacattcgacgtttcatgcaacgctccgcgacaggtaagaacacagtatcgagctaacacctcataccagggatttattcccatcgggcgtttgtcctgctaaacagagtagtcgccccacaacaataaggacgctgcatgcacgccccatcgctccaggacaccaccgcgccggaaggcatctgctacggctgcggcgccagcaacccccatggcctgcacatcaagagccgctgggacgcggacggtatccacctggtcgccgagcacctgcccgaggcaaagtacaccggctggcccgacctggtctacggcggcctgatcgcgatgcttgtggactgccattccaactggaccgccatggcctaccattaccgcgccgaacaccgcgaacccggcagcctgccgcgcatcgattgcgtgaccggcaacctgggcatcaagttcatcaagccgacacccatgggcgtcaccctcaccttgcgcgcccgcgtcgacggcgacgtggggcgcaagacccgcgtgatctgcgaggtgtacgccggtgacgtgctgaccgccgtgggcgactcgatcttcgtgcgcgtcgacaccgaccaactggccgctgccgcccatggccgtgacagctgatcctggtctacattgatggccaccgttaatcgaggactgcaccgatgactcatctcaccgcgaaagactttgcgcccgaactactggagctctacgacggctacgcccacggcaagctcaaccgtcgcgaatttctcgaccgcgccgccctgttcacctttggcggtctcaccgcctcggccctgctcgcagccctgagccccaactacgccctggccgaacaggtgaaattcaccgacccggacatcgtcgccgactacatcacctacccgtcacccaaaggcaacggcagcgtgcgcggctacctggtgcgcccggccaaagcggcgggcaaattgccggcggtggtggtcgtccatgaaaaccgtggcctcaacccctatatcgaagacgtcgcccggcgcctggccaaggccggctttatcgcgctggcgccggatggcctgacctcggtgggcggctaccccggcaacgacgaaaaaggcgtggaactgcaacagaaagtcgacccgaccaaactgatgaacgacttcttcgccgccatcgaatggctgatgcaccacgacagcagcaccggcaaggtcggcattaccggtttctgttatggcggtggcgtgaccaatgcggcagccgtggcctacccggaactgggggcggccgtatcgttctacgggcgccagccggaagccaaggacgtatcgcgcatcaaggcgccgatcatgctgcattacggtgagctggacacgcggatcaatgaaggttggccggcgtatgaaaaggccctgaaagcagccggcacaacctatgaggcgtacatctacaagggggccaaccacggttttcacaatgattcgacgccgcgttatgacgaagcggcggcgaacctggcgtgggaacgtacgctggggtggttccgcaaatacctggcctgactgccccctgtaggagcgacctcagtgttccagtgcatagcgccggcaatggttgaggtagccctgctcatggctccctaccagttgcaccacgctggtccatagccacgacggcgcatccagctgtttggagcggttctcctgcaataccgccatccagtccttgcgtgtatcgcgatccatctgccgggcatgggcgataccgaccacccgtgccaggtaaccggcggcgtgcatggcgtcgatctcgctcaactcgtccagttccagcttcatatcctggggcaacagttcacggatgaaaaaaccattgtccagcatgcgcgtcgccaccatgcgttcacccaaaccaggcgacagctggcgggcgccctccaccacccggcggccattgtcccggggcatcttcgcccgtgccgcacggggcgccgccgcgccgacggcctgtttgatatcgatcaggcaatattcctggtcatccttgtcgcccacgccgagcaaggcggcataacgctgcaggcccagggagctgcagcccttgacccaataggccgagtccagcaactcgaccctggcgtccttggggcggcctttgagtgacgtcaccaattgatggatgtcggccgaggcgcagagcgtttccagtgcggttttttcggcccgtgacagcgaccagaaatgcttgcccaagggaatgctcgggcgagcattttcgatgcgctcacgcgccaggttcttccaggtgcgctccaccgcgctgcgcatgcccgccttgacctgggacgggcgcggcggcgcggcgtcgggcttgtctttgaacgcctgttcgtagcccaccatcatttcttcgagcatgcgcgcactggtaacccccggcaggtccgagccgcgcgcagcggtggccagggacagcgccaggcgcaccaggtcgtgggccgggttgccgatcaccgtctggtcaaggtcgcggatatgcatatcgatgcggcccttgatatcgccggtaggccccaggttgccggcgtggcagtcgccgcagatccagatcgccgggccatggggcaagcggcgcccgctctggctgtgcagccattcgtagaattgcacggtgctgccgcgcacgtaggcgtgggcagagcgggccattttcaggttacgtagttgggtcaggtgcggcaggcgggcggaggggcgcggtatcttcatggaaaaactcagtgcaggtgttgcgatagagcgctggccctcgacaaatgtttcattatgtttcaaaaaaaaacgtttcaatcttccgcagccatgtcccgcaaccagcctttgaacgccagcatcgccgccgtctcggctcgcgactgcaagcgcgtcaaccagtaactgccggtggtgatgccgacatcgaacggctggcgaatcacatcactctccagttgccgcgcaaacatcatcgccggcgccaaggccacgccgaggccttgcaaggccgcctccatcatcgccagcgaagaatcgaacacaatgctgcgcggcagcagggtatcggcgggcaagccggcggcctggaaccacaggttccactcatcggcgcggtaggagcgcagcaaggtgtgtttcaagaggtcggccggtgcgcgtaattgctcggccagttgcggcacacatagcacgctgagcggagcttccagcagttcgcaggcatccgtgccgtgccaggcgccggcgccgaaacgaatggcgtaatccaggccttcggcggccacgtcgacacggttgttgtgggtcgaaaggcgcaggtcaataaacgggtagcgctgctgaaaatccgccaggcgtggcagcaaccagccgaccgcgaaggtgccgaccgccccgacggtaaggacctcgcggtagtgcccgccctcgaactgaccgagggtgtgagcgatgcggtcgaaggactcgcgcaacaccggcagcagggtttcaccttcacgcgtcagcatcaggccgcgtggcaggcgcttgaacaaggcgacattcagttgcgcctccaggcttttcacctgatggctgaccgcagcctgggtcacgcacaactcgatggctgcccgggtgaagctcaagtgccgggccgacgcctcgaacgcgcgcagggcattgaggggcaaatgggaacgcagcatggtctaccctagattttctaatggcagctgcaagatatcatcgtttgccgaagggaccgaacctgactagatttgccacgcctgcgcaggccccgatcgtcagtgcatcatttacatggaagcgaataaccatgaactccaacgtaagaaatttcctgatttcagccttatttatcagctccggcacctgtatggctgccaccgacctgcgccaggtcgtggacagcagcgtcgagcccctgatgcagcagcaaggcatcgccggcctgtcggtggcggtggtgaacaagggcaaggtgcaatactttaactacggcgtcgccaacaaagacaagcaacagcccgttaccgaagacacgctgttcgagatcggctcggtgagcaagaccttcaccgccaccctcggcggctacgctgcggccagcggcaagctgaagttgtcggacatggccagccagcatctcgccgcactcaagggcagtgccttcgaccgcatcagcctgctgcaattggccacctacacccctggcggcctgccactgcaatttccggacgccgccgacagcgccgacaccatgctcgaatatttccagcactggaaacctgtctatgcgcctggcgcacaacgcctttactcgaatcccagcattggcctgttcggctacctcagtgcgcaaagcctgggccagccgttcaacgtcgccatggagaaaaccctgctgcccaagctgggcctgaaaaacacccatgtcagcgtgccgccagacaaaaaccagacctacgcccaaggctacgacaaggatcagaaaccggtacgcgtcggccccggcgcgctggacagcgaagcctatggcatcaagaccagcagtcaggacctggcgcagtacgtgatgctgaacatgcacccgcaaaccctggagaaaccgctgcaacaggccatcgccaccacccacaccggttactacacggtgaacggcatgacccagggcctgggctgggagtactacccctacccgatcacgctgcaagcgctgatggaaggcaactccacaccgatggccatggagccgcataaggtgaaatggttgaccccggccccggcccaggtgcaaccggccaacgtgctgtacaacaagaccggttcgacccgtgggtttggcgcctatgtggcctatgtgccgagcaaggacatgggggtggtgattctggccaacaagaactacccgaatgccgaacgggtgaaagtggcccatgcgatcctgagtgcgctggaccactgatgcacacgccctgcaggagccggctggcgggctcctgcaagttgggttacatcccgagccagtgcggcaacgccagcgaaatgaacggcaagtacgtgaccatgatcaggaacaccaacagaatcatcagccacggtagcgccgcgcggatggtctgccccagcgtcaacccggtcaccgccgaggtcacgaacaggttcagccccaccggcgggtgcaccaggccgatttccatgttcaccaccatcacgatccccaggtgaatcgggtcgatacccagcttcatggcaatcgggaagaaaatcggcgccaggatcagcacgatggccgacggttccataaagctgcccgccaccagcagcaccacgttgaccatgatcaggaaaccaatcggcgtcagcccttcggagatcacccatgcggtgatttcctggggaatctgctcggtggtcagtacatgggcgaagagcatcgcattggcgatgatgaacatcagcatgatcgccaggcgcccggattcgagcagcaccttgggacagtcgcgcagcttcatgtccttgtagacgaacaacgccacgaacgccgagtacaccgccgccaccgcggccgcttcggtcggggtgaacatgccgctgtagatgccgccgaggatgatcaccagcagcaacaggccccagaaggcgcggcgcgcgcaggtcagccactcgcggaacgtggcccggggctgggccggcagcttcttgatgcgtgcgacgatgtagatggcgatcatcagcatcaggcccagcaacaggcccggaatcaccccggccatgaacagcttgccgaccgaggtttcagtcgccgccgaatacaccaccatcacgatcgacggcgggatcaggatgccaagcgtgccggcgttgcagatgatccccgccccgaactccttcgggtagccggaacgcaccatgcccgccacggcaatcgaacctaccgccgccacggtcgccggtgacgaaccggacagcgccgcaaacagcatgcacgccaacaccgccgcaatcgccaggccgccacggatatgcccgacacaggcgttggcaaaatcgatcaggcgctgtgccacaccgccggtggtcatgaacgcgccggagagcaggaagaacggaatcgccaggaaggtgtaggcgtcggacgtctcgaacagcttgatcgccagggagctcaccgagtcctggctgaacatcaggatcgacaccgcaccagacaaacccagggaaatcgcgatcggcacgccgaggaacatgaacacgaacaacaacagaaacagacagagcacggccatcagtgacgctcctcatggctgccggccaacttgctggcctcaccggcctcatcagccagccctaacccgacctgacggtgggtaaagatgcggtagaaaatttccaggtagcggataaacaccatggcaaaaccaatgggtacgatgatcacgatgtcaccgacgtcgatgccgtactggtcgaggtcttctgcgccgatatgcgcggtcatcaccgcgctgacccacttgtagctggcgatcatgaacagcccggcataggccaggcagcacaggcaggcaagcatgcccagcaagcgttgcaccgggcgcctggtcagcttgaccagtgcgtccacgccaaggtggccggcggtgcgcacgccgtaggaaataccgaagaaaatcagccagccgaacatggccttggtcagcgccacgctccaggtcatgtcctgggcccaggtcatggtgtggtcgcccagggcgccgaagaaggtgctgctgaaggcccacttgtcagacagggcaaagaacagcgtgtagatgttgttgagcatgacgtagacaaatgtcaccagggtcatggcggccagcaggaaggcgatgaaaccttcctccaggtgctcccagacgcgccttagcgtttgcatggcaaaacctcgcgaaagcaaatgagatgtcagggtgaaaaccggatcgataggtgggagggggcttgcccccgatagcggtgggtcagagacagatgagcaagctgacacaccgcaatcgggggcaagccccctcccacactgggggattactggttggacgcgtccgccgccttgatcaggtccgcgccgatctcaccctcgaacttctgccacaccgggcgcatggcttcgcgccacagctggcgttgctccggggtcagttcgatgatttcgctggtcttggcgtcgacgatcttctgcttggccgactggttcagcgcttcggcctgtttgttcacctcgacggtgacctcgaccatgatctgctccagggtgctgcggatgtccggtggcaggccgttccagaacttggcgttggtgatcaccatgtagtcgatcaggccatggttggactcggtgaagtacttctgcacctcgttgaccttctggctttcatagttcgaccaggtgttctcggtgccgttgacggtaccggtctgcaggccctggtacacctcggcgaagctcatcttgcgcgggttggcgcggatcgccttgaactgctcttccagcacgctggaggcctgtacgcggaacttcaggccacgggcatccttgggttcatgcagcgccttgttggccgacagttgcttgaggccgttgtgccaataggccaggccgaggatgttcttatcctgcatcgaggtcagcagcgccttgccctgggccgcctggaagcggtcaacggcggccaggtcgttgaacaggaacggcaggtcatagatctgcacctgcttggtgtattgctcgaacttggccagggacggcgccagcatctgcacgtcgcccagcagcagcgcttccatttccttgccatcgccgaacagcgacgagttcgggtacacctcgaccttcaccttgcccggcaggcgttcttcggcgagcttcttgaacaacagcgcgccctggcctttgggggtgttttcggccaccacgtgggcgaacttgatcacgatcgggtccgccgcctgggctaggcctgcggcaaacaaggtggcggcgcacagcagcgcccgggagagcttgagcatggaaaatcaccttcttattgttgtgttgtaaggcaaggtgcctgatgtgacgcgtgtagtgaatttcgaattttagatacctgcgttcggcgtggccgaacgctacgcctgggccgccaacaacctttgcgcgcgcagcaacaccggcgcatccaccatctgcccatcgatctggtaggcccctgccccatgggcgccggcgtccaccacccgctgcgcccaagccaggtctgcggcgctcggtgcgagcgctgcatggatcaccgccacctgcttgggatggatacacagcgccccggcaaagcccatttcataggcatgccggatcgaacggcgcaggccttccgggtcatcgatggccgggtgtacaccgtccaacggcgcgaccagacccgccgcccgcgaatgcacaatcagcgccaggcgcgcctggtccagggcgaactgcgcagccgcggagttgctgctcaggttcaggtccagcgccaggtccagcccgccaaacgacaggcgctgcacctgtggcgcatgggcgatctcggccacggccagcaagccacgggcgctttcgataatcggccagatcactttgccggtggcggcaaccaccgccacttgcgcggcactttcaaccttgggtagcaatacccccgccacattcggatgggctttgcagaacgccacatcctcgaaatgctcggcatgctccggcgcattgatgcgcacccacacctgggcagcggggttcgccgtcaggaacaccccgaggttatcccgcgcctggcgcttgagcggttcttcgaccgcgtcctcgaaatccacgatcaccgcatcggccccactggccagggctttggaaaatcgttccggtcggctaccgggtacaaacaacgccgaacgcaccaatggctttggcatcacagaattccttatttagataacgccgcgtgcacgcaggctgtcgatggcatcgccggagtaaccgagccggtcgagaatgccctggctgtgctggcccagcgccggaacgccgtccatgcgcggggtaaacgccgcattgcgggccggcggcaacagcgacggcagcggaccggccgggctatcgacctcgcgccagctgtcacgggccttgagttgcgggtggtcccatacgccctgcatatcgttgacccgggcgctggcgatctgcgcgtcctccaggcgttggatcaccgcctcggcatccaactgcgcaaagctgtcgacgatgatctggcgcagcacctcacggttcgccgagcgtttgaagttggcgctgaaacgctcgtccgtcgccaattcaggcgtgagcagtaccttgtcgcagaacgccgcccattcgcgctcgttctgcaaaccgagcatcaccgtgccgccatcgccggtgggaaacgggccgtagggatagatcgtcgaatgcgcggccccggcacgcggtggctgcggggcgccgtcgaaggcgtaatacatcgggtagcccatccactccaccaggctttccagcatgctcacgtcgatgcggctgcccttgccggtcttgccgcgcagcagcagcgccgagaggatgccgctgtaggcgtacatgcccgccgagatgtcggcgatggagcaaccggccttggccatctggtcgtcgccagggccaccggtcaccgagagaaaaccgccctcgctctggatcagcaggtcgtaggccttctttttctcgtacggcccgccttcgccgtagccggaaatatcgcacacgatcagccgcggaaagtgcgcatgcagcgcctcgaacgacaggcccatgcgcgccgccgcgccaggcgcgaggttctgcaccagcacatcggcgtcggcgagcaaggtgtcgagaatatcgcccgcctcgtcctgcttgaggtccagggtcaggctttccttggagcggttggtccacacgaaatgcgaggccagaccgcgcacgcgttcgtcgtagccacgggcaaagtcgccgacgccggggcgttcgatcttgatcacacgagcgcccaggtccgccaactgacgggtgcagaatggcgcggcaatcgcatgttccaggctgacaacggtgatgccgtccagcggtcttgggttagtcatgacagttcctcagagccagtgggccatggacgtggcgttgcgcaaatcccagaccttgtcgatcagtgcgttggcctgggccggtgtgcgggcgttgctgaattgggcgaggcgctggaatttgtccgccagctccgtgcggctcagggtgttgcccggatcgcccttgggctcgtcgatggcgccgtgcagtgtgcggccatcctgcgtggtgacggtgacacggccgagccagcgttgcgggtaggcgccgtcgacttcgcggtcgaggctcatgctgaccttgtcgcgaaaagccgacacggccgggtcggtcaacgccagctcatggaactcggtgagcccggccttgccgtgtacggcaatcaagcccagcacagtgcccatggagaacttggcctggtgcacgctggccggtacgttcacgcgccccagtacatcgatggcgccctgatgcacgcgggtttccacgcgggcaatatcggcggcggcgagctgttcgcgctgcatcagctccaacagcgcatcggccgcaggatgggtatggcggcacgacgcatgaaacttgaacgaggtctccagcaatgcccagcgactgcccaggccggcggacaacttgcccggctcggcatcactggacatgcccgccgccagcccttggtcgccctcaagaatattgcgtgcaccggtcagcccatccgccgtcaggtaagcggcgagcaacccgtccgctgccgccttggccgtgtgcagctgcttggagtcggcggcatcgcgcaggaactcccacaacccggcggcctgggtgcctgcgctgccgagcaggttgatgaattgttcctggttgaaatccagcaacttgcccaccgccaccgccgccgccagggtgccgacggtggccgtggtgtggaagatgcggtaatgggagcggcccatgaattccccgatgcggatacccgcctcgtaaccggccaccgaggccagcagcaagtcgcgcccggatttgcccaggtcctgggcggcggccaaggcagccggaaataccacggtcgccgggtgcaacacggagctgttgtgcaggtcatcctgctccaccaggtgcgatgaagcgccattgaccaacgcggcgaagtaggcgctgctgctggtgccattgacgatcacctgggccgggccgctgctcggccccatcttccgggcatagcgctcgaacaacggaatcgggtgcgcccctttactcgccagcgccgaggccagccaatccaggtacaggtcttcggtgcgcgcgaggacggtttcgggcaactgtgcgtagtgcagatccgccaggaaccgacataaggcttgggtatggctcatggtcggcccctcagaagctgcgtggcagttcgagcaggtgctcggccacgtaggacaggatcaggttggtggagatcggcgccacctggtacaggcgcgtctcgcggaatttgcgctccacgtcgtactcgcaggcaaagccgaaaccgccgtgggtttgcaggcaggcattggccgcctcccaggacgccttggccgccaggtacttggccatgttggcgctggcgccggcatgcttgccgctgtcgtattcctcgcaggcgcgccagcgcatcaggtctgccgcttcgatctcgatatgcgcctcggcaatcgggaactgcacgccctggttctgcccgatgggccggccaaacaccacgcggtcacgggcatacgcgctggccttctcgataaaccagcggccatcgccgatgcattcggcggcgatcagcgtgcgttcggcattgaggccgtcgaggatgtatttgaaacccttgccctcttcgccgatcaggctgtccaacggcaactccaggttgtcgaagaacagctcgttggtctcgtggttgaccatgttggcgatgggctgcacggtgagcccgttgccgatggcttcgcgcaggtcgacgaggaagatcgacatgccttcggatttcttcttcacctcggccaacggcgtggtgcgcgccagcaggatcatcaggtcggaatgctggacccgcgagatccacaccttctggccgttgatcacgtacttgtcgccgcgcttgattgcggtggtcttgatcttggtggtatcggtgccggtggtcggctcggtcacgcccatcgattgcaggcgcaattcgccgctggccagtttgggcaggtagaagcgtttctgcgcttcgctgccgtgccgcaacagggtgaacatgttgtacatctggccatgcacggtgccggagttgccgccgcagcggttcacttcttcgaggatgaccgaggcctcggccaggcccaggccggaaccgccgtattcctcggggatcatcgccgacagccagccggcgtcggtcagcgccttgacgaaagcctcgggaaagcccttctcttcatcgatcctgcgccagtaggcggcatcaaattcagcgcacaaggcgcgcacgccttcgcggatggcgttgagttcttcgttgtcattcgggttcatctgcggctctccgcctgttgttcttggattattcgaaattcacctgggcttgctgcgccaggccatcgctattgccagcccacagttgggcaacgccggtttcggtgacgcgcccgcccacttcgaagggttgcggcgcaatcaatgggcgcacaccgcgataggcaaaccggcgcaacgtggcgtcgggatgggcgcgacagaacgcacgcaagttcagggtggcgatcagcggcccgtgcaccaccagcccggcatagccttcggtgccggtgacgtaggggtagtcgtagtgaatgcggtggccgttgaaggtcaccgcgctgtagcgaaacagcagggtcgccgtggggtcgacggtttcgcaccactcgccctgctccagcgcctcgccgctgcccgatttgggcggcgtgggttcgcggtagacgatgtcctgttcctcgcggatcgccaggcggcctgcctgggagtagtcgtggcgcacggtgacgaacagcagcgagccagtgcgcccggtcttttcttcgacctgggtgatggtcgacacccgggtcgccgcctcaccggcacgcagtgcatgcaggaactcgatgcgcccaccggcccacatgcgattgcggttgtcggccggcggcaggaagccgccacgggccggatgaccatcaccgcccagagcggtttccggcagtgggtcctggaagaaacaccactgccacagcggcgggatatccgcgccgtcttcgggcacggcttcgccaaaggtggcggcaatacgcttgagcaggttatggctgaggtggtcgtgggcggtttcgctacggccgatccaatcggtggcgctcatcgggtgcaggtcctcgggcagtgagtgtctgccccggatcatgcaagggtgtacccgttccgggaatttgcatttcaataaaccagcgttcggttatgctgaacgccgccatcctgtcccgggagtcttgcatgcacttcgatctggccgacctgcgcctgtttatccacatcgccgaatcccccagcctgacccagggcgccaagcgtgcgttcctctcgccggccgccgccagtgcgcggatcaaggccctcgaaggccaactcgacacgcgcctgctgtaccgcgacagccgtggcgtggagatcaccccggccggagagcgcctgctgcaccatgcacggttgatcatgcgccaggtggattacctgaagagcgaattcacccaatacggcgtggattcggccgggcatatccgcatttttgccaacaccacggcggtcaccgaattcttgccggaggtgctggcgggcttcctgtcccagcgccccggcgtgaccgtcgacctgcaggagcgcctgtcccgcgacatcgtgcgcggcgtactggatggcaccagcgacatgggcatcatcgccggccccgtggaagcctcggggttgcaggtactgcacttcagcacggataaactggtgctgatggtgccggtggggcatgcgctggcggaacaaccctccgtcaccctggaacagaccctcgcctaccagcacatcggcctgcatgaaggcagcaccttgctgagcttcctgcgtgaacacgtcgagcggctgggcaagcagctgtcgctgcgcatccagatgtcgagtttcgaggcaatctgccgcatggtcgaagccggtgtgggcatcggcatcattccggagtccgccgccgtgcgccacagccgtaccatgcggctggtggcggtgaagctggatgaaccctgggcaatccgcgagcgcagcatcctggtgcgggagctggaggcgttacccggcaccattcgtgcgttgatcgccacgttgatgccggactcggtcagtgcaaactgaggttacgcagacgcgcaccgtccacggtgacatggctcaagcgcccctggtcgtcgaataacagccagccgtcctcggtgcgacggatgttcacttcgtaacgaggccagtgcagcaccgcacacaggtggtcactggcgcgatggataaagtgccaacgcgtgtcgcgttcgccggcaatatagccgaacaccaaccactgcgcgtcgagggcaatgcgcaccgggtcgccgtcgaagaaaccttcgtcacagcccggcatgcgataacccttgcggttgccatcgacatccaggatcagcgtcggctcttcgtcatcgcggcacctgatcccgtactcaatggtttgatcgagtgcacagtacagcgcgtggctttcctgcgactgcgtggacgccggctcacgcccggccaaccgacgctcaggcaagcgatagtgccagcgttcgacaccctcgcgcgggttgtagagccagaggaactcattacgttcgttgcctttgagcgcgcgcagcgcccccggcaagtcgctgacatgccacagggtctgaaagttgcgatccacgtccaccacgcgcagttgccggtcctgaccgagggtccaggtgctgccgtcaaactgctcggcgaacacctccagcacctgcacgcccaggtcggtggcggtacggttgaccaggtcgagtttgctgatacgccatacccggtcacgccgggccagcaccagcgccatctgccgactgtgagccaggacaatccgctgggccggcacggcgaagaggaacagtggctggccgctggcatccgtcaccaccgcaccggcctcgcccagcgccaccaggtaacgctcgtcatccagcgacactgcgtcgtatatcggtcggctaccctgggtcggggcggtccactccagcgcatcacccacccctaccaacgagcgtatggcaggccgcttcagggcctggccaggcaagtctgcctgcaacaatttatcgcggctcatcttgaccagcgcttgcagctgattgaagttcagcccgccgcgaccactgagttggtcggcgatcactgcgtgcacggttgcaccggccagccaactcagggcagcggcatcagatttgtgcgccaacagggcgtgcgccagggcgtcacgctcggcgtatcggtcgggagcgtcgcgcaactgttcgatccacggcccgtaagcttccagggtctgcggcagcagaatcgcgcgtttgaccaaggcccccatcgccagccgcccaccggccgcttcggcatccagcaaccattgcgccgcgcgcgtgcgctcatccggcaggctccacaccacctcgacggcttgcagccacaggcccttggcgatcagcgattcggcccactccaggcgcaaacgctcggcaatctgcggctgcctggcctggagcaacaccacggcatcggcaaacgcatcgtcacgccgcgccaccagtaaggcacgctgccagttctcggccaggcacagcagacgcacgatgaccgccgacggcatgtcccaggccagggccaggtcggcagcctgttggtaacgtgcgtgcttttccaggtagtcgagggcttcctggcgctccttgagcagttcggcgaggacaaataccgcttcttcgatccggttttcccgagccaggcgttcgtatgagcggcgatagacctcgcgcaggtgctcggtcaggctttgttcgaagtggtaggcgcggcctggcccgctctgctggctgagggtcaggtcgtcgcgccgctgcggcgtaccgaagttctgttcagcatccggctcctggcctcccagaggaatggcatggcgcaaggcttcggcaaaatcaccgtcctcgaacatctccagcatgcgctgcatgtaggcggcctggcgtttgccgtagagcctggacagttttgaaagctcggtcagacgggtcagccaacggcgccaggcggacggtttaagccgagccggtgtggcccgctcggcgatgcccggatccgccggtgccgaaggcgcggcgccgacgggctgcacgcctcgacgcaggtatttgttgatgcccatcaacaaggcagtgaacaccgttgcgcctagcaacatgcccaggatcacgcggctgatgtcttcagtggtcgaagcaggaatcggtgtcaggggttgggattggctgtgagtgcccatccagatcaacccggcgaccaacgccagggtggcgcccagtttcaacgccgggtactgcgcgggcgcctcactggcccatggctgggccgccttgggaggcgctgctttcggcgctggcggttgacgctccagcaacgcgcggatcacgccttcctgctcgggactgaccggcgccaagccgccaaggatctcacgcacatcggtgatgtccggcacgggcagctgcggcgcaaccggcgcatgacaatcgaaggtatcgagtaaggtgtaggcactgatctccagccacaacccaggctcaaggaccttggcgtcgcgcagctgcaaggcgtgcacctggctggcgcgcaccagccacaagtcggcggtgggtaaagcacgcagctcgtcagcggtcagccgtgccgaacacaacccacgcccctggcggaccagcggccagccgtctaaggtctggcaatcgagtgcgacgggcacgctgaactgcaacacatctccgtcggcaaaacggtaggcggcggcgcccgcgcgccagtgtccgaggatcaggcgagcccgctcctgcgtggtgaagcggtcagcaggcaaccacacaccgtcgatggactggtggccggtcagcagcggtcggcggatcagcaggggttcgtgctcatgcatgggcaggctcttgtttcaggtcgcacatgacttgcaaacgcatggcgcgctcggtgacgttgaacaccagtagttcccgggcggtggtcagcaccgccaccagcccgctcatggggcagaagctggcacgggcaatcggtgcggaggtggtgaacagcgtctgttgcagaccttccgagtacaggccgacggtgtgctggttcgggcccagcagtaccaatgcatagcactcctgcgcggccacatggtgatgcaggccgatagcactccagcccggcgccaagtcgatctgcgcccttttcgcggggaagctgtcgtgggtcaccaggcgccaactctggcggccatcatggtgagtgagtaatgcgcacccgccaaaggtgtacttccagtgggaggtgctggcgaacagtacctggctgaccccggccgctgcaccgaccgcatagccggaactgcggacaccagaggccgttgcggggtacgccaccagttgcccggcctcgctgcgggcgtagaccaacgacaaggcatccagctgcgccaagcctatgacattgttggttaccgagaaaaacgcgcccctcggtccatgaccgggacgctgccagtgggcgagctgaccatttgtatcaagcacatacaggcgttccgcttgttggccgcgcagccacaccgcgggcagcaaggtcgcggtgcccggtggcaggtgcagctcttcgcgtgcaggtttgttggcggaaacaaggccggggatattccagaaggtcaggatgtggccatcaccgagcaccgcaccgaggctgcgataattaaacgcggcggcaaacacatgctggtgtttgccccacaggcgacggcgtacctccagggcttttttctggtttttgtgcggcagcttgatcaccaccatgccgtgttcgtcgagcaggcgcagggcgacatagttgccggagccggagatgaccggtggcaatgtcaaagccacccgcgccacccgcccggtggcggtgggcggcggggtatgcgcggcgttatcgaactggcccttgagcaggcgcaccgcctgttgctcgtcgggcatgggcagcgacacgcgtcgtgactgcaaggcaaaagacagactgcgtccgtccaggttgcgcgcaatctgcacgcggtgggtgcaggtcttggaatcggtaggcggcaagcgctggccgaccacccagcactctcccacccgatgttcggccaaggcgtcacgccaagccagccaatgggtgtcgctcaccacctcgtaggtgcgggcctcgagcaagcgcttgagttgcgccgccgagtccagctcatgcaacaccggcgtgccctgcagaatgccccagcgcaattgcgcccccgcctcctcggctcgccgcgccagcaatatcagcagcgccaggtgtaccaggcgcgcgacgcccaattgcaggggtccggcgtcgaacaacaccacgatcagacggttcgccgcctgggcgcggtactgtggcgcgaggaacatatgctcgccgccgaccgcccggcgcaggaactcatcgggtacttcatcggccagcagccattcgctggagagcagccgctcataggcaccgcgccggtgcaggtcgcccaggccgtcgggctccggcacaccgccctggtgcaggcctcgcagcggtcccaacagcgggttgaggcggcccagcaggtcggcgaacacgggtaactgttccggggcaaaccattccagccagtgccgccagggttgcagcgactcaggcagttgcatgagtgactccccaataatcagcgatacgttgcacaagggcaggcgaaacggccagcaagcggtccaacgggaccacggccgcaggctcatgccacaccagcaggggcgaacgcttgaagcgtgcggaaaaggcctggcccagcaggtcttggggcacatccggctcccagctggtcggcaaccagaggtgtggcgcgctcgcgctgggagccgcgtaagccacgccgtcgacccacggcagatcagccgtcgagccggtcaccaccagcacctcaccgttggccgtggcgtgcagacgcgcggcgtgttcaggctcaagcagcgccaggcgcctgagcatccggcgtgccgcatcaccccaggccacggcggcttgcgcctcgacgggtgcctggcgtgagcgccagcgccaaggatgggtcaacgcactcattcggcaggtatcagcaaacgtgtaagttgcccccgcgcctgctgcaacggctcgggcatcgtctggctgttgaagttcgcatcaatctcgcgcaacaacccttcgagcgccgtactggtcggcggttcgctacgggcgagatagtcttcggcggtttccagcaggcgattcagacgtgacatcggctgcaacgtagcctcttccacggcgctgaacagatggctgttgctggacgcggcaaacaggtcgcgcaacacctcacgcccctgttgttgggtggcctgggtcggcaacacgtacagcagcggccacaggtcagcgtcgctggcttcgaggcggccgctgagcaacgcggcggcggcgatcaggcgttgggatttgacgatgcgtcggtcagacaactggatgccggcttcacgcagacgacgaaccgcctgggccagggcgggacgcacggcggccaggtcgacgtttttcaacgcatggccaagcgtgtccagttgcgtgaggcccagcaactgctgcaccgggcgttgctccgactgccagccaccggccagcatggcctccaattggttgtccggcaccgactcgacaaacaggtgcaacaggaaacgatcaccaaaggccgccagcgcttcatcatccggcaggccgttggccgcgccgacgcacacccgcagcgggcattgcacctgggtgtggccacggcggaaacgccgctcgttgagtacgccgagcaaggtattgaggatcgcggtggagcccaggaagacttcgtcgagaaacacgatgtcggcttccggcagcatgccgctgacatcggtttccaccgtgccttcgcgcagctttttcaggtcgaccgcgccaaacagttcggacggttcggtgaagcgcccgagcaggtactcgaaatagcgcccgcccatcgactgcgcaacgcgccgcaccacggcgctcttggcggtgccgggcggcccgatcaccaggatatgttcctgggccaccgccgccagcacgatcagttcggccaattgctcgcgccccaccaagccctcggttgcggcacgtacagcatggcggatttgcgcggcagcgctttgcaactgagcaatcatgggcgtcttccctgaaaccaaagcgctgaatcttgcctgaggctaaggtattagcaaagcgttgttacataccctgatcaggagtcagcccatgcagctcgaaggatcctgccattgcggcgccgtcacattcagcctcaccagcgcccacccctacccttaccagcgttgctactgctcgatctgtcgcaagacccagggcggcggtggctacgcgatcaacctggccggtgacaccgcgagcctgaaggtgcgcgggcgcaaagccatttcgatctaccacgccaggctcaagcccgaaggcgccagccgcgcccatgcgagtagcgccgagcggcatttctgctcgcaatgcggcagcgcgctgtgggtgttcagcccggaatggccggagctgatccacccgtttgcctcggccatcgacacactgttgccggtaccgccggaccatacgcacttgatgctggcgtcgaaggcgccgtgggtggagctcacagtgcgcaagggtgacctgcagtttgacgagtacccgcaggagtccattgcgcagtggcatgagcggcatgggctggcgcgttaatcaccacagaatttttttgccataaaaaaaacaagcctcaggtggacaagcgaaattgacagattgtagattggatacagttgacaatctaaaagcagtcccaccacaacaaaaaaggtacttgaaatggcaatctggaaaggcgttttccccgcagtcaccaccaagctgaccgaggatggcgaggtcgatttggcggcaacccaagccagcattgatcgactgatcaataatggggtttcaggcgttgttgtcctgcctatgctgggcgagaacgcgtcaatgagcatgcaggagcgcgaatcagtcattcgcgcggcggtcgaggtcgccgacgggcgtgtgccggtgctgtgcggcctggccgaaatcaccctgcaaacggccaggaagcatgcggcgctgtacaagcgttttggcgcccaaggactgatggtgtttccaagccttggctacaagaccgatcatcgcgagacggtggaatggtacaagggcatcgccagcgcaaccgacttgccgatcatgatctacaacaacccgatcgcctatggcgtggactgcaccccggcgatcctggccgacctggtggacacacccgagatcgtctgcgtcaaggaagaaaccggcgacatccggcgcgtgaccgacatgtacgtggccttcggcgatcgcttcagcatcttttgcggggtcgacgacctgatcgtcgaaagcagcgcactgggcgtcaccggctgggtgtcgggcatgaccaacgtgtggccggcagaatgcgtcaagctcttcaatctctgcgcccagcaacgcttcagcgaagcccgcgagctgtaccacatcctcaccccgtcctttcacctggatgtacacgtcaagctggtgcagtacatcaagctggccgagcacctggtctacggcgcgccggaatggacgcgcgcaccacgcctggcccttgtaggcgaggagcgcgaatacgtgatcagcaccgtccagaaagcgatcgatagcctcgccgttcgcggctgacgcaacgggccctttcgcctcgtcaaggggcccgctccgtcaaccatcatccaaccccttcacagccatttttcattgagcgagtcccgttatgtccattacaggtgagatgctgatcggtcagtcgaaggttcgcggtaaaaacggtcagatgtggggattcaacgccgccaccggtgagcccctttccccagccttcggcggtgccacgctggacgacctcgacagcgcttgcgcactggcaaatgcggctttcgatgcttaccgcgaaacgacgccagggcatcgtgcggttttcctggaaaccattgcgcgcaatctcctcgcgctgggtgatgccttgatcgaacgttgcatggccgaaacaggtctgccgcgcgggcgccttgagggcgaacggacccgtacggtcaaccagttggcgctgttcgcctccgttgtccgcgacggcagtttcctggaggctcgcgttgatcctgcatgccctgaacgcataccactgccacgcgcagacatccggctgcgcaacattgcccttggcccggtggccgtgttcggcgcgtccaattttccactggcgttttctgtcgcggggggcgataccgcctctgcactggccgccggctgcccagtgatcgtcaaggcgcactcggcgcatccaggtacatccgagctggtgggccaggcgattcagcgttcaatacgtgcatgcaatttaccggagggcgttttctccctggtattcgatacgcagcacagcatcagccaggccctggttgccgatcaccggatcaaggcggtgggcttcacgggttcgcaacgagcaggcatagccttgatgaatattgcagcggcgcgcccggagccgataccggtctacgccgaaatgagcgcgatcaacccagtggtgttgctgccccatgcgctggccgaacgcagtgcggcgatcgctgacaccttcgtcgcttcgctcatcctgggcgcaggccagttctgtacgaaccctggattgatcctggcgatcgagggcccgtcactcgcagcctttgagcacgcggcaatcaccgccctgagcgccgcacctgcgacaaccatgctgacgcgtctgatctatgacaattattgcgatggtgtcgaaaaactgcgtgcgcagtctggcgtagaactgcttggacgaggacgacaaggtgaaagcttccaagggcaggccgcgctgttcgccaccagcgcgcatgcgttcctgaaaaatacagaactgcgtgacgaggtctttggcgcctcatcgttgatcgttcgatgccccgatgcctccagcctgctgcaggtacttgaagcgctgggaggtcaattgacgatttccgttcacgccagcaccaacgactaccccgcactcgccgcgctgctgcccacactggagaaaaaggccggacgtattctgctgaacggtttcggcacaggcgtggaagtctgtcatgccatggttcatggtggccccttcccggcgacttccgaccctcgctccacttcagtaggcagcctggcgatcaatcgattcctgcgccccgtgtgttaccaggacttcccccaggctttgctacccccggcactccaggacagcaacccattagggctcagccgaaggatagatggcacagtgaaaccttgacatgtttcgcgctcatttactggaagcgtcctacactcgtgagcctgaggtatgatcgaccgatggggatctcaaatcctggatccattcacctgtcagtagttgaagaatgccgaagaaagagcctttacccaacctgcgcatcaaacgtcaaagcttgcctgaaaccctggcggaatcactgcgtgagcggatcctgaatggggaattcaaggaaggcgagtcgctgatccaagagaccattgcgaccgagtacggtgtgagccgcatgccggtgcgtgaagcattcaaggagctggaggcgtccgggctgatcacgacgcagattcacaaaggctccgtggtgaagtccattccccttgagcaaatcgcggagttgtttgacctgcgtgcgctattggaatccgagctattggaacgctccctgccgaaaatgaccgacgcacactttgcggccaccaaacaattgctgccgcaacttgaagccgcctacctcgacgatgacatcgcgcaatggggcaagctcaactggctgtttcatcaaagcctgtatgcagcggctgatcgtgtgcaaacgctggctatcgttcaaggcatcaacgttcagacggatcgatacatccgcctgcaactgttgctgaccgcggggaaaaaagaagccgaagtcgaccaccgcgagctactccacctgtgcgaaaaacgtgatgtcaagaaagcggttcagttcctgcgcaagcacattcagcgtgcaggttctgacctggtcacactgctcaagaaaaaacgcgataaagaaacccaggcttgaatgccagtggcgcccctccttggcggaggggcttgtccacttggctcaattgagttgaaacccatgcgccagcggatcgcgctcatccacaagaatagtgttgtgccccgtgacctgagcccaaccagcaatgctcggcatgatgcccgggaaagcacctacctccgtcgccgactcgacccgacaatcaaacagtgtgccgatgatgctctcgtggacaaacgtatcgcccaccttcaagcggcttcgggcgaccagttgtgccatgcgcgcagaagaacctgtgccacacggtgaacgatcaatggccttgtcaccgtaaaacactgcgttgcgcgcgtgcgcgcgtgggttcctgggtttgtcacaccacatcacatggctgatgccctggatacgactgtcttgcggatgcaccggcgccagcagcgcctgcgcggccttacgaaccagaggactcaaccgaataatttcactgacgtccattgaatccaggccatcccaaccggcttgcggctcgatgatgacgtagaaatttcctccatacgccaggtctatgttcaatttgcccagggtgggtacatcaagcgccacattagctgcgtggagataactcgcaacgttgtacaggcgaacctgctccactctcgtaccgtttttcacgtagtcgatcgcaacgcgcccggccggcgcctcgatggccaacgaaccctcgatcctcggcaccaccagaccggcttccagcgccgcagtcaccgttccgatggtgccgtgaccgcacattggcaggcagccactgacctcaatgaacaacacgccgatgtcgcaatcctcacgtgacgacggatacaagatgctgcctgacatcccatcatgaccacgcggttcgaacatcaacgcttgtcgcacccaatcatgctcgcgctggaaaatctgacgcttttcagccattgaaacattgggcagcaaaggcccccccgcggtgacgatgcgcaccggattgccacaggtatgcgcatcgatgcaaaagaacgtatgacgagacataggaactcccttttgaacgcgttagttgaaacggctgattgcatagggttcaaggtcgaccaaagagggtttgcccagagcaatatcgctgaccaagcgaccggttgtggccgcctgggtaagcccgagatgaccatggccaaaggcgtatatcaccgagggatggcgcgctgaggcgccgatcaccggcaggctgtcaggggtcgcagggcgatgcccggcccaacgggtaccgccctccgtacgcaacccgggcagatagagcgcggccagcctggccaaggcctgggagcgcttgaaattcgccggtgcattcaacccgccgaactccgcggcgccaccgaccctcaaaccacagctcaacggcgtggccacgaagtggcgctccgcgaagatcacctccctggacaagacgacacccggttcgggaagggtggtgttgtagcctcgctcgctttccagcaagaccttgtcgccaaggcgctgggcgagtaggcctgaccacgcaccggcggcgaccacgaccttatcggccgttaaccaccggccatcgacgagccccaccgacacagcgctaccctcaaggcccggccggataccacaggcctcggcgacctgaatgcaaagccccctggcaagcaatgactgacgcaacttatcaaccagggtcttggggtccctgacgtgtgaccactggggtgtgaacaccccgcgcgtgattgtccgacccagtgcaggctcgatttcacgtgcttcgttgccggtcaacgtgcgcacctcaacaccccacgctcgtttgaggccccactgcattgcgtccttgtcaaacgccgcttctttctcgtagaccgtcagggcgccgagttgtagcagctcttcgcgaagattgtgttccgcgagcagcggcagcaggtcgtcgtagacccgagcgttaagtgccgccaacgccgccgatatgcgcttgaactccgagggcctgccggcacgggagaaacgcagcagccacggtatcaacctgggcgcgtgccccggacgtatcgccaggggtcccaacgggtccgccagccatccgggcactttccacaacacgcccggcaccgcagctggaatcacttccgtgaccgcgatgcctccggcattgccgaacgatgctttgtcaccttcagggtcgcggtcaaccagggtgacgcggactcccgcccccagcagatgatgcgccgttgccagccccacaatgccggcgccaatgacgattacgtgcctcatgaatcgcacccttttcagatggaaaaaatgcacctttttgaaagcaatcatgcccgatctgatcgaccagaacgagcgcatgtagattggatacaataaacacaatctgtcaaccgtcgctgctgcgtctgccaaaccctgacacacttcatagtcagcaacatcttttttattagacacaaccaattgttttttaaggtttatttagaatttataggctgtttttttgaccttcaatgcaaaaaaccctgtttccccctctacttccgcgaataaacatttggtagatttttcgacagatgtagattggatacaacgcataccaacgccacacccctaaaaaatacaatgccaatcagatcggggatttccatgaacattgcacgtcacgcaagcacctctctcctgctcgtcctcgccacaaccgcttccatgaactcagccggcgccggttccaccctggaccaggtcatttcatcaaaaaccctacgatgcggtgtgcaactcgactacccgccggcgggttttcgcaaccaggccaatgagccggagggatacgacgttcagtactgcaaggacatggccaaggcccttggggcaaaggccgtgattgtcgagacaccttcctccgaacgtattcccgcactggtgtccaatcgcatcgacgtgctgattgcttccacctcgatctcaccccagcgcgccatgagcgtgaatttttcccagccctacgtgaactacaccaacgttgtactcacccgcaaagacgccaacatcgaacgtttcgaggacctgaaaggccgcaacatcggtggtgtcacaggcaccacgaccgagcaggaactgcaggcgctacgcaaaggctgggatgacccgaacggcagctatacggggttcggcagcgaagccgaaggttacctggcactggcccagggcaagatagacggcgtgatcatcgggaatgcatcggcggccgcactggttcagagcggtcaatttcccacgctcacgatcaagggagtagcacctacgcctcccgacctgtgcggcatcgccgtcaaaaagtcagacccgcagatgctcaattgggtgaagaccttcgtatggacccaagtcaagaacggtcgctaccaagaactgtatgcgcagtacttcggtgacggcgaggcgcctttgctgacagttgccggcgtggactactaacctcaccttccgagcggccggccgcggccgctcctgcctggagcctgcgctatgttcgggtacacgttttattggtcaatggtctgggagaagctccccgagctgatcgagggggcaaaaacgacgctggtgctgaccgtactttcaatgatcatcggcacgctgatcgcccttgcgctgaccctgttacgtcaacaggaaaaaggccttggatacgctgtcgcaacgtcctggatcgaagtcgctcgcaatacaccagcgctgttccaggtgtacatgatctattttggccttggcgcactggggctgcatttctccagctacctggcgatgctgttcgccctgtctttcaacaacgccggctacctcgccgagatttttcgtggcgggttgcaggctattccacgacaacaacaccgcgcagccaggtcgttgggtatttcatcattcgctgcctacacccatgtggtctttccgcagctgttcaggattgtctatttcccttacgtcaaccaactcaactgggccctgctcaacagctcgctgggcatgatcatcggcctgcgcgaactcacgggcgccacgcaggcggcccagtccgaatccttcaggacgtttgagtttttcatcatcgccgccgtgatctacttcgtcatgtccaagcttatcgagggcggcgcccgactcactttctggcgcgtgttcaaggggtaggcaatcatgcaattccaattggcttactcaggtttgcactggggcgatcttccgtttgtgctcaccggtatgtggcacaccttgttactgacgctgctggccaccttttttggcagcctgctcggcgtgatgatcggttggcttcgacaagaatcagtgttcgcacgtctcgcactcggaccgttcgtcaacgtcatccgcagcattccgctgatcatccagttcatcctggtcaacagcctgtttgccatggccggcttcgggatgagcccactgtttatcggggttgtcgtcctcagcctgtacatgggcatgctgacctcggaactggtccgcgcgggtttgcaatccgtgcgcccgcaactgaaaaaagccagccggtcactcgggctgagctattggcaggagctgcgccacctatccgccccgcttgcctttcgcacactgcttcccggctggattggcacagtgataggcctgacaaaagatacagccctcgtgagcgtagtgggctacatcgagctgctgagagcttcacagatcctgatcaaccgctcgaacgaagcactcctggtgctcgcgggcgcaggtctcttctactttgcgatctgctacccgatctcccgctacagccgccatctcgaaaaggtaatgcaccatgattgatatcaaggatgtccgcaaaagcttcggcgctgtcgaagtcatcaagggcgtcaacctgaccatccagaagagtgaagtgttgtgcctgatcggcgccagcgggtcggggaagtccaccttgctccagtgcatcaatggcctggagccgattcaaggaggtagcatcatggtcgacggcacggatgtgcacgccaggggaaccgacctgaacaagttgcgccagaagctcggcatcgtgttccagcaatacaacgcattcccccacctcaccgccctggagaacgtggcgctggcgccgcgcctggtcaagaagcttcccaacgcccaggctctgcaactggctcgtgaccacctggctttcgtcggcctcgacaatcgcgcagacatgcgccctgccagcctgtctggaggccagcagcaacgactggcgatagcgcgcgccctggccatgcagcctgactacatgctattcgacgaggtcacctccgccctcgaccctgaactcgtgggagaggtgctggatactatccgcaaactcaaggactcaggcatgaccctcatcatggtgacccatgacattgccttcgctcgcgagtgcgcagaccgaattgcattcttcgataacgggttgatctgtgaagtcggtgacgctcgccaggtaatcaatgagccacaggaagaaaggacacggcagttcctccaacgcgtattgcactgacgtgacatgagccacacaccttggcgcgttaacagtctttgacagtttctcgacaaagctgtcaaagacccccgggcgccacgcccctagcatttgagcatccaaaccacctgccgggtgctcatcatgcttcgcacgttgcgcggtattccattgctcggttgcctgttgggcagcatcggctgccaggggcaagcctctaccccgccgccgatccccaagggcgactacagcgcgatcatccgctacctgcaaacccgcatcccccgggatatggcccaggccaatgtgcccggtttgtcgattgcactggtcaacgggcaggagttgatctgggcgcgcgggttcggcatggccgacaaaaccctgggcgtgcccgtgacgccgaacacggcgtttcgcgctggtgcgatttccaagctgctcaccgccagcgccgccctgcaactggttgaacagcagcggctggcgctggacgcaccgatccaacagacgttgcgcgagttctatgtgcgttcgcgtttccacaccgaccagcaggccgccgaccgcgacatcaccttgcgtcgcctgctcagtcatcaatccggcctgcccagcgagcacctgcgcgacctgcgcaacagctatgccatggggcagatgccgatgcgcctgtccggcgtctggctgagcacaccgcccggcacccaagtggcctattccaacctgggttatgcgctggtcggcgcggcgatcgaacgcagcagcggcagagagttcgaggctcaattgcaacacagcctgctcaagccgctggagatgaaccaggcgagttttatcggcaccgcagtacaggcgggttatcgcgcccagggctatcagggtggtatcgccagcactgacgcgcaagtgcgtgacctggcggccggcggtttgtgggccagccccaaggacctcagccattacgtacagatgttgttcgccgagggcctgtacaagggcaaccgggtgatgaaccagcggtccatcgatgacatgttcacccagcaaaacaccggcaacgccctggacttcgattgccggatcggcctggcctggtttctcgcgccgtgcggtgacgagccggtcgggcctggcgtgcgcacctaccagcacagcggtggcggcgatgattttgccgcgcagttgaccctgctgccggaccagcaactggcggtgatcatcatggccaatgacagcaacgccgaagacctggtcgccaacctggccaccgacaccctgcgcctgatgctccaggcgcagaccggcgagccggtgtgcagcgacgagtgccaggcgccccgtcacgggctcaagctgcgccaggtgccggccgccatcgaccgccagcgcctgtccggcttttacgccaccgcctggggcgtgttccgcatccgggacgacgccggtcggctacgcggcgaactggccggctacgacttcgagctgctgcgtgacgaccacggctggctgcgcgcgcaaaagaaagtcctcgggttctggctcaaggacctcggcgaactcggccgcgtacagctcgacgtgatcactgtgcagggccgacagatgctcaccgcgcgcagccacggccagcgcatcgccatcggcgaacgcatcgacccgccgcccttgcccatggcgtgggccgacaccgtcggcacctatcaagtgctcaacacccatgaacccgacgcgccgttgagcggcatcagcgtgcgcctggaagacggcttcctggtgattcgcggccaactgcacgacgagcctttgaccgattacatcctgctgccggtggacaacgcccacgccgtactcgccggcaacggttatggcctgggcgacaccgtcagccgccaggtcaacggccttagcgcctcgggatactccttcaaacgtacccatccacccttgagtttctgaccgacatgaaaaccctgatgagccccaaaaacctctgcctgtccctcacctcgctgtgtttgctggcaagcgccgacgcagtgctggccgaggactggacctacacgctcaaagccggcgtggccaacctgccccgctacagcggcagcgatgagcgcatgactgcgccggtgttcggcggcgccatcgtcagcccctgggggattttcctcgacaccgacaaaggcctgggctggggctacgaaggcaatgccttgagtttcagtgcgtatgtcggcgccagtgcatcgcgcaaggacaaaaacgaatccatgcacttgggctccaagcgccttaagggcatgggcgaaatcaagtcacgcccgcagctgggcgtgagcgcccactacaatctcggcggcgccattgtcggcgcgaccctggagcacgcgctcaaggaagatgaccacaaggacagcggcaaggcctttacgcatttggagctgagcctgggcaccacgctgtacgaaggccgttatggctccgtcgatgccaacatcaacagccactttggcgaccgtgactatatgcagacctggtacggcgtcaccaccggccaggccgcacgcagccgcttcaaggcctacaaggccggtgccggcaatatcagcaatggcctgaacctggtctggagcctgccgatcagcgagcacaccgagttctcgaccttgctggatgtgcagtacctggcggatgaagcgggcaagagcccgattgtggagcgacgcttgcagacgtcggtgatgggcgtgctggaatacacgttctgattggataggtgggagggggcaagccccctcccacacttgatctccattgaatgtaaaagcgctattcggcgtaggcccaggtcatccggaacgacgcgccgccccattccgaatcctgcacctgcacctggccaccgtgccactgcgacacccgctgcaccagcgccaggcccaggccgaagccaccggtgcggcggtcacggctggcatccaggcgcatgaagggttggaagatcttcgaacggccttcctccggcacgccagggccgtcatcacacacccgcacttcatacccgctgccgaacttgaccaacgacacttccacacggcgctcggcataccgaatggcattgcgcagcaggttgatcaccgcacgcgccataaagcgcggctcgatctggatatagtccacttcgcaggtgcgcaacgacaactggatgcccgcggcttcggcctccagcgccacgctgccgatcacactgtcgagccagctgtgggcctcgatgcgctcgcgggtgacctgggtggcgccgcgctccaggctggcgtaggtgagcagttcggagaccatttcttccagctcgcccaggtcggcatacatgtcggcgatcagttcgccacgcagacgcgggtcggcttgttgcttgagctggtcgagctcgaacgacaggcgtgcaatcggcgtgcgcagctcgtgcgacaccgcattggtcagttcgcgctggttggcgatcaggctttcgatgcgctcggccatctggttgaagtgccccgccagttcgcgcacggtggaacggcgcggcagcaggatgcgagaactgaggtcgttgtcaccaaagcgttgtgcggccaggcgaatatgctcgaggtcgcgccagtgcgggcgtacccagaaatacagcacgatcgccaggcacaccccgaggaaaccataggcccacaggtagagccacttgggttcttccggcagcttgatttccagcagttgcgggccgccgtcaatactggtgagaaactccatgaaatcaccgcgcaccaccagcaaacccgcagccagcagttgcgtctcgcgctcggtgagtgcctgggtgtccttctggaccaacttcaagtgcagcccgtaatggggttgcagctcagccagccgggccgggcgttcgtcggccctgagcggacgcagttgctccaccagggcatacgccgggccgcgcaaggcttcgcggttataggtttcgttggcttcgggcaacagctcgtcgaaggtgtagttgaccagccagatcgcccccgccagaccgagcgccaggatcacatacaggcgcagaaacagccgcagcatttaagcctcccacgcgaacggattgaacaggtagcccttgccccagatggtcttgatacacaccggttcacgggggttgtcgttgagcttgctgcgcagtttgctgatgtacacgtcgacgctgcggttgaggccgtcgaacgcgataccgcgcatgcggttgaggatgtcatcgcgggacaggatcgtgcccgagttgctggccagcagccacagcagctcgaactccatggtggtcagatcgatcttgtcgtcgcccaggctgacgccccggcaactgcgatcaatggccaaccgcccgaatgccagggcaccgcgcacggtcggctccggggcctggcgtcgttgcagcgcacgcaggcgcgccagcagcacaggcggcttgatcggcttgatcacatagtcgtcggcgccggactccaggcccaggatgtggtcaaggtcatcttccttggccgtgaggatcacaatcggcgtgtcggacacggcgcggatcccgcggcacacatgcaggccactctggccaggcagcatcaggtcgagcacgacgatcttcggcttgaactccaggaacgcagccagggcctcgtcgccccggtgctccacacgcacctcgaagccatgctgcgccaggaagtgcgcaatcagccccgcgagtttttcgtcgtcttcaacgagcaagaccttgcccagccccaggttttccataagttctcagtgtgcagacgcggattgaagagctggcattataggtggcaagctgcgcaactaaagcaactgcgcagcggctgccgacgaagcttcatgcttttaagagtttttaacaaataccccgcactctttaacgccgtccacagggagttgtatgcgcaaggattacctggcgttctttgtttcgctgttcctgtcgcggctggcggaccagatcctgctgttcatcgtgcccctgatcgtattccagaccacccagagtgtagcctgggccgggctggcattcttcgtcgagtcgctgccgcgttacctggcgttcccggtgtgcggcgccttgtgcgacaagttcacgccggtgcgcctgctgcagatcagccaggtataccgggcgctggcgtgcgtgctcgcggtggtgttgtatggggtgttcgatggcctttactggattgtcctgctctcggcgctgtgcggggtgctcacgacccagggcatcatggcgcgggaagtgctgatgccgcatatcttcgcgcactacagctacgccaagaccctctcctactcgcagatcgccgaccagagcgggctggtgctggggccgctggtggcggcgctgatgctggaagtctgggcctggcattgggtggtactggccgtggccggattgtttgtgctggccgacctggcgatgcgcgtgtggcaacgctccagcacggcgcacctggaaaccttcgaacagcatcaggacatctggctgcgaccgctaaagattgcgttcgggcatatccgcaacctgccggacttgaaacggatcatcaccctggccgtgggggtgaacctgatcattggcgtcaccctggccacgtcggcggcgatggtcaccggccagtttgcggcgggcaaggacgcctatgccttgctgcaggcagcgggcgcattagtgaccatcggaattttgttttacctggcccgggccggactgccgttgaaggtactgggcggcttgtcctattcgatgatcggcgtgggggcgttgatcatggccgcaagcccaggcgtgtggctgtacgccgtgggtttcctgctggtgaccggcttcgacaagatgttcaacgtctacctgcgcagcacccgccagcgggtgatccccgtgcaggacttcggcaagaccgtgggcgtgatcaccctactcaacaacctgccgcaacccttggccggcctggcagtggcggtgctggcggcgccgctggggacgcagacggtgatcctgctgctgaccgggatcgccgcgttgctcggtgtggccgtggcctcaggctggcacgccactgtgaaagcggaactcgatgtcgggtgactcgatcagttcctgctcggtcgccctcacccgctcgatcacctgggcgacgtccttggcgtcgccgtattggtacgccagcttcaggtaaccctggaagtgccgcgcctcgcttttcagcaggccgaagtaaaacttgccgagttcctcgtccaaatgcggcaccagggcttcgaaacgctcgcaactgcgcgcttcgataaaggcgccaaccaccaaggtatccaccagtttcacgggttcatggctgcgcaccactttgcgcaaaccggaggcgtaacgcccggcatgcagttggcgcagctcgatcttgcgcttcttcatcaggcgcatgacctgctcgtggtgcaccagctcctcgcgggccaggcgcgacatcatgttgatcaggtcgacatggccgtagtacttggcaatcaggctcagggcggtgctggcggctttgaattcgcagttcttgtggtcgatcagcagggtttcctgatcggccagcgcggcctggacccaggcatcaggggtgcggcaaccgaggaattcgtggatttctggcaggttcatcgggctcacgggcaaaaggatcacaaaaggccggcgattataccgaccccgccgcagaccaccagccaccggccttgatgtgcatcaacatgacgtgcgcacgccagcaactatagttgttccaggcccccgtcctttttatggagatcccgatcatgcaagccatccgcagcatcctggtgatcatcgaacccgagcattcggaaagcctggccctcaagcgtgccaagctgattgccggggtcaccgatgcgcacctgcacttgctggtgtgcgacaagaagcatgagcactcggcgctgctggccctgctcaaggcgggtttgaaggaggacggctacagcgtcagcaccgaacaggcgtggaatgccagcctgcatgaaaccatcatcgacgtgcagcaggccgagggctgcggattggtgatcaagcagcacttcccggacaacccgctgaaaaaagccctgctgacgccggcggactggaagctgctgcgctattgcccgagtgcggtattgctggtcaagacgtccacaccctggacgggcgcaaagatcctggcggcgatcgacgtcggcaataccgatggcgaacaccgttcgctgcacaattcgatcattgaccatggctttgatatcgccaacctggccaaggcgcagttgcatgtgatcagcgcgcatccttcgccgatgctgtcggcggcggacccgacgttccagctcaaggaaaccatcgaggcgcggtatcgcgagcaatgcagggcgttccaggcggagttcgatgtggatgacaaacacctgcatattgaagaaggccctgccgatgtactgatcccctaccttgcccacaaactgtcggcggcggtcacgatcatcggcaccgtagggcgcaccgggatttccggggcgctgatcggtaacaccgcagaggtggtgctggacgccctggaaagtgacgtactggtgctgaaacctgacgaagtgatggatcgcctcgtggagcaggccaacaaggcctgatgccgacctttcaaacaatgaagataaaaaatgtgggagggggcttgcccccgatgagggtgtgtcagtggataaatcccaggctgacacactgccatcgggggcaagccccctcccacaggggttatccgttgtcagttggaaaacacatcgcgcagaaaccccggcgcgatatagcgctggtaatgcgcctcggacaggataaagaactcccgatcaatcgcatcgcgcaggtccggcaacggccagtcgcgaaactccggcaatagcaccatgccataggcctccaggttggagatcacccgcgccccccgggcgatcaactggtaggcccagcagtactcggactggtgcggcacgaagcggatcttgcgctgttccaactggccgcgcagggtcttggggtcgaaaacctccagtttgccggccattacctgcaccaacagctgctccaggcgtagccagaccgcacgtttttcttcttcgttatagcaattccactggatcacttcgtggtggaagcgcttgcagccccggcacaccagatcgccgtaaaccgtggagcacaggccgacgcagggggtcttgatggtttggttggacatgggtaacggcacgcagatcagcaaaacaatgcgccatgttagccctttgtctaagctcgatcacccagcaaacttggtcaggcaacttacctttagaaattttttgccgtagaatcatccggccttgtaaggcgccaataatccgctggaagctgttttcaaagcgtcacgagcacagtcgttccttcagaacggtgttggcgcgggtcatgactcggtaggtcagagccctcgccaaccctcatcagctccgttctgcaggcgtaaaactttgaaagcagcttctgtgaggaatgccggcagcgctggctttgcggcccaaaaagcccccgagcgcatgcgtgccgttcatttctggatgagcgtcccgtgggaccactgatgagggtaataactgtgcttgaagcctaccgcaaacatatcgaagagcgtgcagccctgggtattgttccccagccgcttaacgccgaacaaaccgcaggcctggtcgagctgctgaaaaatcccccggctggcgaagaagaattcctcgttgacctgatcaccaaccgcatcccaccaggcgttgacgaagctgcctacgtcaaggccggtttcctgtctgccctggccaagggcgaagccacttcccccctgatcgacaagaaacgcgccgttgaactgcttggcaccatgcaaggcggctacaacatcgtgaccctggtcgagctgctggacgacgccacactggctcccgtcgccgccgcccaactcaagcacaccctgctgatgttcgatgcgttccacgacgtggccgaaaaagcccgtaacggcaacgaacacgccaaagccgtgatccagtcctgggctgacggcgagtggttccgcaaccgccctaccctggccgacaagatcagcctgcgcgtgttcaaggtgaccggcgaaaccaacaccgacgacctgtcccctgcgccggatgcctggtcccgtccagacatcccgctgcacgccctggccatgctgaaaatggcccgtgaaggcatcgtgcctgacgagcaaggcaagaccggcccgatgaagcagatcgaagaaatgcgcggccaaggcttcccgatcgcctacgtcggtgacgtggtcggtaccggttcctcgcgtaaatccgcgaccaactccgtgctgtggttcttcggcgacgacgttccgtatgtgccgaacaagcgtgccggcggcttctgcttcggcagcaagatcgccccgatcttctacaacaccatggaagatgctggcgcactgccaatcgagttcgacgttaccaacatgaacatgggcgacgtgatcgacctgtacccgcatgctggcaaagtctgcaaacacggcaccgacgaagtcatcaccaccttcgaaatgaagaccccggtgctgttggacgaagtccgcgccggcggccgtatcccgctgatcatcggtcgcggcctgaccgacaaggcccgtgccgagctgggcctgggcccaaccgacctgttcaagctgcctgaagcgcctgtcgacaccggcaaaggcttcaccctggcgcagaaaatggtcggcaaggcgtgcggcctgccagaaggcaaaggcgttcgtcctggcacctactgcgagccgaagatgaccaccgtgggttcccaggacaccaccggtccgatgacccgtgacgaactgaaagacctggcgtgcctgggcttctcgaccgacctggtgatgcagtcgttctgccacaccgcggcctatccaaagccgatcgacgtgaccacccaccacaccctgcctgatttcatcatgacccgtggcggtgtatcgctgcgtccaggcgacggcatcatccacagctggctgaaccgcatgctgctgccggataccgtcggcaccggtggcgactcccacacccgtttcccgatgggcatctcgttcccagccggttccggcctggtcgcgttcgccgcagccactggcgtaatgccgctggacatgccggaatcgatcctggtgcgtttcaaaggcaagatgaaacctggtatcaccctgcgtgacctggttcatgccattccttactacgcgatccagtcgggtctgctgactgtagagaagaaaggcaagaagaacgccttctccggccgcatcctggaaatcgaaggcctgaacgacctgacgctggaacaggctttcgagctgtccgacgcctcggctgaacgttcggctgctggttgcaccatcaagctgtcgaaagagtcgatcaccgaatacctgaactccaacatcaccctgctgcgctggatgatcggtgaaggctacggcgatccacgcaccctggaacgtcgcgcccaagcgatggaagcctgggtcaagaaccctgagctgatggaagccgatgccgacgcggaatacgctgaaatcatcgagatcgacctggccgaaatcaacgagccgatcctctgcgcaccgaacgacccggacgatgcccgtctgctgtcgagcgttgccggcgagaagatcgacgaagtgttcatcggttcgtgcatgaccaacatcggtcacttccgtgccgccggcaagctgctggagcaggtcaagggtcagctgccaacccgtctgtggctgtcgccgccgaccaagatggacgctcaccaactgaccgaagaaggctactacggcatctacggcaaggctggcgcgcgcatggaaatgccgggctgctcgctgtgcatgggtaaccaggcacgtgtagagccgaactcgactgttgtgtcgacttcgacccgtaacttcccgaaccgtctgggtgacggcgccaacgtctacctggcttcggccgagctggcagcggtagcttctaccctgggtcgcctgccgaccgtcgaagagtacatgggctacgccgcgaaactggacaccatggccagtgacgtctaccgctacctgaacttcgaccagattgctgagttccgcaagatcgcagcaagcgccaacatcccggtgattcaagcctaaggtgttgatgtgaagagacgccgcgtatcgtgaggtacgcggcgttttttatgcctggaatgcagtacaaatgtgggagggggcttgcccccgatagcagtgggtcagccaataaatccggcactgagacaccgcgatcgggggcaagccccctcccacatttttaccccgtcaggtttaagcgaagaacgaataaaccaccgcagtaatcgccaccaaccccaccgcggtgacgaacacattggacgcctgcccccggtacttggccatggccggcaccttgcgaatggcatacatcggcatcaggaacagaatcgaagcaatgatcggaccgcccagcgcctcgatcatgccgagaatgctcgggttcaacgtcgccacgatccagcacaccaccagcatgaacgccgccgtcatgcggtccaggcgcttggcctccggacgacgccccgtcttcagcaccaggcccttgaggccttcgctggcgccgatgtaatggcccaggaacgacttggcaatcgccacgaacgcaatcaacggcgctgcgaactcgatggtcgggttattgaagtggttggccaggtacgacaggatcgacaggttctgcgccttcgcttcggccagttgcgccggcgacagggtcagcacgcaactgaacacgaagaacagcaccatcaccaccatcaacagatgcgcacgcgacaggatctgcgagctgcgctcatcggcgtgggcgccgtactggcgcttctggtccactgcaaaggccgagatgatcggcgaatggttgaacgagaacaccatcaccggaatcgccagccacagggtgttgagcagtgcggacggtgccgggacttggctggcggtgctgaggatgccgccgttccaatgcgggatcaggtacaccgccaggaacagcaacgcgacgataaacggatacaccatcaggctcatggccttgacgatcacttgctcgccgcaacgcaccacgcccagcaggccgaggatcagcacgaacgacaggatcgcccgtggcggtggcgcgatgtgcagttggtgttccatgaagctgccgaccgtgttggtcaacgccacactgtagatcagcagaatcgggaagatcgcaaagaagtacagcaaggtaatcagcgcgccggccttgatgccgaagtgttcttccactacgtcggtgatgtcggagcctgcacggccagacagtacgaaacgggtcaggccacggtgggcgaagaaggtcatcgggaacgccagcagcgcgaggatcaccaggggccagaagccgcccaggcccgcgttgatcggcaagaacagcgtaccggcgccaatggcggtgccgaacaggccaagcatccaggtggtgtcctggcggctccagcttgtgagggttgcaggtgtcgttgcatagcgttcgtcgacgctattggcctgatcattcatccggtcggatctccgcatttacacagccgggacgagtcagaaaaacctgacaggcagcgccccgaccatagaaggggccggattgtccgggattcttgtgaataagcaaagacttagctgaggaacggtggtgcggtacaggcccgcaggggcggctgtaggcggcgattttcgcggcgcttggcgagatacctgatatacattcccgcacaaatctattttagaatttcacacgttactgtagttttcacacaacgcccaccgtgtatccagagagccccgccatgcctcgcgtctcccgcaaacaagccgatctcaaccgcgaaatcatcgtcgaggccgccacgcacctgtttcgcgaacgcgggctgcatggcatcagtctgtcagacgtgatggccgctgccggcctgacccacggcgggttctacgggcacttcgcctccaaggaggccctggccaccgaagcctgccaacaggcattcgagcacgccaacctgggctggcaggccaaaatcgagcacagcgacgatcaacaggccgcccgccaggcggtgctggggccttacctgaccgccacccatcgcgacaaccctggcgacggttgcccggtctcggccttcgccccggatatgtgccacgaacccgctgataccgccttgcagcacacctttatagaaggcgtggaaaagtccctggagattttctctcaactggacgacggagaccgtcaagccatgctggcccattacgcgatgatggtgggcgcagtcaccttggcgcgtgcgacacggggcaatagcctgtcggacgagttcctgaaggctgcaagaaataccctgttgcccgttgacagcccttcccccatcccagcatgatcgggccatgaacattatccagctcgtcctcacccgtaccaccatcacgaccgcttacggcgggtcgcgcggtggctgtgggtgcttgagctagacacttcacagatccaacccaaggccccgccagcaatggacggggcctttttttgctccgtccgttcggcaaccaccaggagcaacaccatggctgacgccctgctgatcatcgatatgcaaaccggtttatacgatggcccggacaaaccgtttgaacgcgaacgcgtgctcgcctccatcaaccagctgattcatcgtgcgcgcaacgcaagcgtaccgatcttcgtggcgcgccacaccggccctgggggctcaccgattgcagccggcagcccgttctggcagctgtggcatgagctagaggtcgacgaatcccgcgattacctgttcaacaagacccgtcccagttgcttcctgggcaccgatcttgagcagcaactgagcgcggcgcaggtcaaggagttggtgatcgtcgggatgaaaacccagttctgcatcgacactacctgccgggtcgccgtggagttggggttttcggtggtgctgcccgaagatggtcatacctgcatggacacgccggcgctaaaagccgaggcgatcatcgagcatcacaatacgaccctggccggtgcgtttgtaaagcgggccagcgtggccgagatccgcttctgaccgcacaaatacggcatactcctcccctcaaacccttcaggaagagccttccgatgaccgctactgttctggtcctggttgaaaccatcaacgaatacctgcccatcatcgagggcaatgactttcatgtgatcctggcgccgacccctgccgaacgcgccgaagcgatcaaggcccacggcagccagatcaaggcggtgctgacccgtggcccgctgggcttgtacgccgaggaaatcgccgccctgcccctgctggaaatcatctgcgtgatcggcgccggctacgaacacgtcgacctgcaggccgccagcaatcgcgggatcgtggttaccaacggcgccggggtgaatgcgccgtcggtggccgatcacgccatggcgttgctgctgtcgctggtgcgcggcatcccgcagaccgacgccgcggtgcgccgcagcgaatggcccaaagtgatgcgcccgtccctgggcggcaagcaactgggcattctcgggttgggcgccgtgggcatggagatcgccaagcgcgctgccctggggttcggcatggaagtgagctatcacaaccgccaaccgcgtgacgatgtggactacacctactgcgccaccgccgttgaactggcgcgcacctcggacttcctgatcctggccacgccgggcggcgccagcactcgccacctgatcgaccgccacgccctggatgccctggggccgaatggctacctggtcaatatcggccgtggcagtgtggtggtcaccgccgacctggtcgccgccctggagcagcgtcgcatcggtggcgccgcgctggacgtattcgacgacgaacccaaggtgcccgacgcgctcaagaagctcagcaataccgtgctcacctcccacgtggccggactgtcgccggaagccgcccacgacaccgtgcaacgcgtggccgacaacctggtggagtactttgccggccgcccggtgctcaccccggtcgccctgccccccgcccactaaatgaccgatcaggcacgctgatcatcgtccaacacgctaacctattaagccgccccgaccttgtcgctgggcggctgcgcgcattagattaggaaatagtccaaggcctttagaataagcagaagggataagcatggcgctgaacgaccaatcgacccagattcgcccaggcgaagagcttgatgccagcctgatcgatccctacctcaaggcccatatcccgggcctggacggcacgcccaggatcagccagtttcccggtggtgcgtccaacctgacctacctgctggaataccccggccaggaattcgtgctgcgtcgcccgccctttggtcacaaggccaagtccgcccatgacatgggccgcgaataccgcattctcaaccagctcaaggacggcttcccgtactgccccaaagcctatgtgcattgcacggatgagtcggtgatcggtgccgagttctatgtgatggagcgcgtcaacggcatcatcctgcgctccgacctgccagccgaactgggcctggacgccagcaggaccgaggcgttgtgcaaaagcttcatcgataagttcgtcgaactgcaccaggtggactaccacgcctgcggcctggccgacctgggtaagcccgagggctacgtggcacgccagatccgcggctggagcgaccgctacgagaaagccctgacccccgacgcaccgcgctgggaagcggtacgcgcctggctcaacgacaagatgccggccgatcaccccacgtccagcatcgtgcacaacgactaccgcttcgataacgtgatcctcgatccgcacaacccgatgcagatcatcggcgtgctggactgggaactcaccaccctcggcgacccgctgatggatctgggcaacaccctcgcctactggatcgaagcggcggacccggcaccggtgcaactgatgcggcgccagccgagcaacgcccccggcatgctcacccgccgcgagttcgtcgactattacgccgagcgcgcaggcctgcagatcgacaacttcgacttctactacacctacggccttttccgcctggccggcatcgtgcaacagatctactaccgcttcttccatggccagacccaggacaaacgctttgcgcagttcattcacatgaacaagctgctcgagcagatgagcctgaacgtcatcagcaaatcgtccctttaaggaaccgctatgtccaagacccacctgttcgacctcgatggcaagatcgcattcgtttccggcgccagccgtggcatcggcgaggccatcgccaagttgctggcccagcaaggcgcccacgtgatcgtctccagccgcaagctggaaggctgccagcacgtcgccgacgcaatcatcgccgacggcggcaaggccacggccgtggcctgccatatcggagaaatggagcagatcacccaggtattcgccggcatccgcgagcagttcggccgcctggatatcctggtcaacaacgccgcgaccaacccgcaattctgcaacgtgctggacaccgacctcggtgcgttccagaagaccgtggacgtgaacatccgtggctacttcttcatgtccgtggaagccggcaagttgatgcgcgagaacggtggcggcagcatcatcaacgtcgcctcgatcaacgggatctcgccgggtgtgttccagggcatctactcggtgaccaaggccgccgtgatcaacatgaccaaggtgttcgccaaggaatgcgcggcgttcggcattcgctgcaacgccctgctgccgggcctgaccgacaccaagttcgcctcggccctggtcaagaacgactcgatcctgaaaatggccctggcgcagatcccgctcaagcgcgtggccgagccgagcgagatggccggtgcggtgctgttcctggccagtgacgcgtccagctacaccaccggtgtatcgctgaatgtggacggtggtttcctgtcctgatcaggcattcggcggctgttgccgaaagctcaccgccaggcggttccagccactgatgctggacaccgccatggtcaggtccaccagttcctgctcgctgaactccacacgcaccgccgcatacagctcatccggcaccgtcgaggtgggcagcgtcgccaccgactcgctccaggccaatgcagccttttcccgcgccgtgaagaacggcgaatcccgccatacgctcaaggcaaacaaacgtcgctcggtttcgccgcgttgacgcgccgccatcgagtgcatgtccgtgcagaaaccacagtagttgagctgcgatacacgaatcttgatcagctccagcaaaggtttttcgatggacaggtcgaaggtcgtcgcctccagcatcagcatgcccttgagcgcttgcggcgaggcggtgtagtaatccaggcgaggttccatgggcgtttctctgaggttgcggcaaggacagtccagcctagagcccgcatggaataagccctatagccaatcggccggtttacgcacagaccattttgcgccagccctgcacgcgcgtactcttggcgcagattgaatgccctgggacaagtcatggaactgcacgttgtaatcaatggccgcaaggacctggccgaacagctctatcaacagctgcgcgaagccatcgggtccgggcgcctggccgccggcgcgcaactgccgccaagccgtttgcttgccgaacaattgggcgtgtcgcgcaagaccgtgtctgacacctacgccacgctgacctacgaaggcctgctggtgggcaagaccggtcgcggcaccttcgtcaacgcaagctcgccgcagtccgagcgcgtgcaaaccgccgccgacctggcctgtgccgccaacctggcgaaatggcaggcgctgccctcgccgatgcgtcatcccacacgcgatagcaccttgcgctatgaatttatcggcggcgccaccagccgcaaccagttcccccaggacgaatggcgccgctgcacccaggacgcgctgcggcgcattgcccagaacagtggtttctacagccaacccgagggcttgccggcgctgcgcagcgcgatcgccgggcacatcgcgttctcccgtggggtcaactgccgcgacagcgacatcgtggtcaccaacggcgcgcaacaggcgctggacctgattgcccgcgtggtgctggaaccaggcagcattgtggccatggaagaccccggctacagccctgcccgccagatgttcatcgcggtaggagcccaggtcgccagcgtgccggtggacgaacagggcatccgggtcgaccggatccccgatggcacacggctgatctacgtgacgccctcccaccagttccccctcggcatgccgatgagcctggcacgtcgcgaagccttgctggcgcgtgcgtttgcgctgggcgcaatcatcatcgaggacgattacgacagcgagttccgttacgaaggacggcccaccgactcgctgcaaagcatggacacccgtggcgtggtgacctatgtgggcaccttctcgaaaaccctgctacccgagctgcgcctgggctacgcagtgctgccgccggccatctacggtgcggtgctcaaggccaagcaattgaccgaccagcacagctccaccctgccccagtgggcgctggccaagttcatcagtgagggctacctgctcaagcacatccgtcgctgccatacggtctacgccgggcgtcgcgaacgcatcctgcaacgcctggcgggggacctgtcgccgtggttcgaagcggtgccgaccgtggccgggttccacatggcggcgctgtgcaaggtgccggtgaatatcccgctgctgatggagctcgcacgccgggtggaagtgggcttgtaccccctggatgtgttcttccacgacgcgccggtacgctcgggcctgatcatcggcttcggcgcgatcgagaccctggacatcgacccggcgctggacaaggtgcgcgatattctccagcagattggctagcgaattttccgccggattggtcattggtcctgtcaccatcaggctctagcctgtgcactgccacccgacctcggagaccatcgccatgcaagcctttgcctataacactgtccatatccgcgcggcggtcgggcgctcatcggaactgggcgaacgcctgcaagggattgtcgacgccgtacgcaccgcgcccggttgcctggattacaccattcagcgcgacccggtggaccccgacctgtggaccgtcaacggccgttgggcctgcgtccgacaactcaacgcccacttcgcgctccctgcgctgcaggggttcatcgaactgacccgcgaacacctggccctccgcctggaattcgaccactgaggcattggcctcctggtcttcgcagggattggtcattggtcacccaggccttgcggcgtagggtgaacaggtctcgaactactcggaaacttcatcatgaaacgattgctcgccgcctccctaatgctcgcctcgctcagcgcctttgctcatgaaccggtgtacaaccaggagtcgatcaaggtcttgcaggagcacgcgctgaccaatgtcccgggcaagaaaaccctcatgctcaccgtcgactatgcccccggccaggccaccgtgccccacagccacacgggcaccgccgtggcctacgtgctggaaggcgcgatcacttcacgggtgaatgacgagcccgcaaaaacctacaaggtcggcgagtcgttctacgagccggccggttcccggcacttcgaatcgagcaatgccagccagacccaaccggccaagctgctggtggtgatggtgctggatgacaaggccgaggtgcttacccccctgcccaagtaacccgccacgccacaaaccagaaaggtgggagggggcaagccccctcccacattttgatttgcatcggtcagtgactcaggggcgctggaactggcggcgcaggccttcgatccgctcgcggcaggcgcaaccttccaagtgatcattgaccatgcccatcgcctgcatcaacgcatacatcgtggtcggccccacgaacgtccagccgcgcttcttcaaggccttggacaagcgcactgaggccggcgacgtgggattgcccgtccagtaagccatgtccaccaccgccggccgttcctcctcaccgggttcgaacgcccacaaccagcgcgccagcgacccggtctcatccaccagctcacaggcgcggcgcgcattgttgatcgtggacacgatcttggcccgattgcgcacaatgcccgggtcctgcatcaagcgcgcgatatccgcctcgccgtactgcgccacccttatgaaatcaaagccctcgaatgccgcccgaaactgttcacgcttgcgcaaaatggtgatccacgccatgcccgcctgaaagccttccaggcagatcttctcgtacaactggatatcatccgccaccggcacgccccattcggcgtcgtggtaacgcgggtattccggcgccgccgtgcgccagctgcagtgggtgtgcccattgtcgtcagtggtcagtcctggtgtgtccatccatcacctcatgtgccgagcagcggatgataagcgaaaaaaattccaccccgccaaccgctcaagcatcgcccttaccgaccaactggtcagaccgggacctgtcaaccgccaaataattgcttgtgatttcaaaaataccgggcgtagactggccccgcactggacttaccggtaagaccacaacaattaagccctggaaccaccagggcaccgaatagagatccctcccatgctcagatggtgctcgcgttcgattttcctgcaagtcgtgattggcctgatgctcggcatcgcctgcggcctggcccttcccgaattctcctcgcaactcaaacccctgggtgacggctttatcaagctgatcaaaatgctgatcggcctgatcgtgttctgcgtggtggtcagcggcatttccggcgccggcgacttgaagaaagtcggacgcatcggcctcaagtcagtgatctacttcgagatcctcaccaccgttgcgctggtgatcggcctggtcatggccttcagcaccggcatcggccaaggcgccaatatccacctggaacaattgtcctccgctggtttgaatgaactggccgacaagggccagcacatccgcggcaccagtcagttcctgatggacctgattcccaactcggtcatcggtgcctttgccgacaacaacgtgctgcaagtgctgctgttttcggtgctgttcggcagcgcgctgaacctggtgggcgaagcggcgtcgggcatctcgcgactgatcaacgaactgagccatatcattttccgcatcatgggcatgatcgtgcgcctggcgccgatcggtgtgttcggtgcaatcgccttcaccaccagtacctacgggctggactcgctgcagcacctggggagcctggtgggcctgttctacctgacctgctttgccttcgtcgcgctgatcctcggcctggtgatgcgcctgtcgggcctgcgcatgttgccgctgctcaagtacctgcgtgaagaactgctgatcgtgatgggcaccgcttcctccgacgccgtgctaccacagatcatgcgcaaactggagcacctgggcattggcagctccaccgtcggcctggtgattccaacggggtattcgttcaacctcgatggcttctcgatctacctgaccctggccattgtgttcatcgccaatgccaccggtacccccctgtcgatgaccgacctgttgacgatcctgctggtatcgctgatcacctccaaaggcgcccacgggattccggggtcggcgctggtgatcctggcggcgaccctcacggcgatcccggcgattccggtggtgggcctggtgctggtgctggcggtggattggttcatgggcatcggccgtgcattgaccaacctgatcggcaactgcgtggcgaccgtggccattgcccgctgggagaaagacatcgacatccagcgcgccaacaaggtgctcgacggtcagcaaggctatgccttccaggccaagaagccggtgttgcccgcacaccaggagttctgaaatgtgggagggggcaagccccctcccacacatccattcgcaacatcaaggagacgcacgacgtgatcagcacctcaaccgtcgtcaattcagtcgtagaaaaactccgcgccgccttggcgcgtggtcagtggcgccggggtgaaatgctccccggccagcgcgaactggccgaacagatgggcatcagccgccccagcctgcgtgaagcggtcatcgtgctggagaccctcggcctggtgcgatccatgcccggcaaaggcgtggtggtgctggaaaccagcgtcagcgaaccgcagtccagcgatgccgtggccgacgccagcctggaagacatcctgcaactgcgctacaccctggagccgttcattgtcggcctggtggcccagtccatcagcagcaaagaggtcggccaactgcgcctgaccttgatggacatgcgcgaagccctcgatgccggtgacgctgaagcgggcatgaacgcctacatcggctttcacgaggaactgttcgccctcacctccaacccgatcttccagaacgtggtgcagcagaccagcaacgccctcaagcaaagcgcccaggtgctgcgcaactcgcccgaacacctggccgaacgcctgcaggaaaacgaagccgtggtgcgcgccatccgcaacaagaacagcgccctggcgagtgccgagatgcgccggcacatcctgcaggaaggcctgcgcatgggcattgccctgaacatcccggacgaccatctcggcagctgattttttggagacaggccatgaccgcccacgccttgcactacgaccccatcctgccgaccctgcgcctggtcgccggtaaaaagccttcggtggatgacatctacccgcgcttgttcgacgccatcctcgaacaacgtatcgccccggccagccgttttaccgaagaaggcctgggcgaaacgtttggcgtgagccgcagcgtgatacgccgggtgctggccaagctgtcccatcagcaagtgatcatcctgcgccccaaccagcgtgcccaggtggccgcgccggatgctcagcagacgcgacagatcctcgaagcgcggcgcatgaccgaaatcactgtggtgcagttggcctgcgcccaagcgacagccacgcagatacgtcagttgcgcgaactgattgcacgggaacgtgattgcatcgaacgcgatcagcgtgggccggcgattcggttgtcgggggagtttcacctgcatttggcgacgatggccggcaatgcgccgttggcgcagttcctcaacagcctggtgccgttgacgtcgttgatcattgcccagtacgaggcaaaggcctgcacgtattgcgcgtggcaggagcatgtggcgattgtggatgccgtggagcagcgcgattcaaacgctgccgtggccctgatgaaccagcacctggctcacctggaaagcaaattactgaaacaccactgatatccagataataaagatccaaatgtgggaggggcggtgcgacgattcgacttgcccccgatggcagtgtgtcaatcaatgaagatgttgactgatacaccgccatcgggggcaagccccctcccacattggtttcaccaggggtctaggccggttgcaacaccgactgcccactcaacgccaggtccagcaactcacggttggctaccgcgtacatggcgtagtccgtgccgaccgcagcacggatttccaccatcatcgccacccaacgctcggccatgtccttgtgctgctcaagccacagggccacgcgggcttccatgtcttgtggcgcatcggccatttgcaggacggaaatggtgatcgcgcgttgctgccagtccacatcgtcgcggaacgcttcgcgggcctgggcctgccagttgttgcccaccggcagatcactgatctgctgcaggtaccacggcaagtccaaggcgctgccgacggcgaagtaggccttggccacttcggcggcgtcatgcccggtcacgtcagcggcttcaatgatcggcagcaaggtgtacaggtgggtcgtgccagcaaccatgcgcgccaacagttccggtacgccggcttcggtgtaggcctggtagcgcttctgccagccttcgcgggtcgggccttccagcagttcgtcgagcttgaggcccagcgccgccaggtgcggaccgaagtgcgcggtgtcacggccagcgtcctgctcgttgcgacggctgcgcaggaaccagcgcgtggcacgacggcccaggcgcatcagctcgtccatcaactgcaattgcacgtcggcggagacctggtggtccagggcttcaatctgacggaaccagtgcgggaggtggaagatgtcacgcacgatcacataggcgccagccacgttcgccgggctcatgccggtcgactctttgagtcgctgcacgaaggtgatgcccatgtggttgaccaggtcgttggcgatctgggtgctgacgatctcgcgcttcagacggtgacgacgcatggcctcaccgaacttggcgaccaggctcggcgggaatgcggtctccatgtcacgagtcaggtaatcgtcatccggcaccagcgacttgagcagcgcttccttgaggtcgatcttgctgtacgagatcagcaccgacagttccggacgggtcaggcccttgccgttggcggcgcgctcggtgagctgctcctcggtcggcaggtactcgatagcgcggtccagcttgccacggccttccaggtcgctcatcaggcgcttgtactcggcggcacgctcgtaggcacggcgcgccgccagggacagggcctgggtctgcttgtagttgttgcccaacaccaggctgccgacttcgtcggtcatgctcgccagcaactggttgcgttgcttgtcggtcatatcaccggcctgcaccacttcgttgagcaggatcttgatgttcacttcgtggtcggagcagtccacgccaccggcgttgtcgatgaagtcggtgttggaaccgccgccattgaggccgaattccacacgacccagctgggtcatgccgaggttaccgccctcgcccaccaccttgcagcgcagctcgttgccgttgacgcgcagcgcgtcgttggccttgtcgcccacgtcggcatgactttcgctgctggccttgacgtaggtgccgataccgccgttccacaacaggtccaccggcgccttgagcaaggcgttcagcagttcagtcggggtcagcttgtcggccgcgatgtcgaagcgttctttcatctgtggcgagatggcaatgctcttcgcgctgcgcgagaagataccgccgccttcggacatgatgctggtgtcgtagtcggtccaggccgaacgtggcagctcgaacatgcgctggcgctcgacgaagctggtcgccgggttcgggtttggatcgatgaagatatgcaggtggttgaaggccgcgaccagttgcagcttgtcggacatcaacaagccgttaccgaacacgtcgccggccatgtcgccgacgcccaccacggtgatgctgtcttcctgcacattgatgccgcgctcacggaagtgacgctgcacgccgacccacgcgcccttggcggtgatgcccattttcttgtggtcataaccggcagaaccaccggaggcgaacgcgtcacccagccagaagccgtagtcgatggcgatgccgttggcgatgtcggagaaggtcgcagtgcccttgtctgctgctactaccaggtacgggtcatcgtcgtcatggcgcacgacgttggccggtggcaccagggcgccatccttgaggttgtcggtaatatccaacaggccggaaatgaagatgcggtagcaggcgatgccctcggccgcgatctcgtcacggctgccgcccaatggcaggcgacgcggcaagaagccgcccttcgcacccaccggcacgatgaccgagttcttcacttgctgggctttcaccaggccaagcacttcggtacggaagtcttcttcacgatcggaccagcgcaggccgccgcgcgcgacgttgccgaagcgcaggtgcacgccttcgacccgtggcgagtacacgaagatttcgaacttcggcacaggcttgggcagctcagggatcgcgtgcgggttgaacttgaagctgaagtacgacttgttctggccgttcgcgtcggtctggtagaagttggtacgcagggtcgccttgatcaggtccaggtagcgacgcaggatgcggtcttcgttgagcacctggacgtcgtcaagggcggtgaggatcgcttgttccagacgttgctgcttgtcttccaggtcgtcgctggtgagcttgcgcgccaggtagaaacgggtcttgaacaaccgggtcaactcgcgggcgatgtcggtgtggttgttcagggtgctggcgatgtaacccaggtcgaagcccaggcggatctgcttgaggtagcgggcgtaggcacgcagcagcgcgacgtcgcgccacggcaggccggcggtgagtaccaggcggttgaacgcatcgttctcggcgtcgccatgcacgatgtgcacgaatgcgtcctgcagagtgtcgttgagctgctggatatccaggttcacgccctcggcggcgatgaacgcgaaatcatggatccagaactcgcggccattggcgtgacgcaggcgatacgggaactcaccgagcacgcgcaggccgaggttttccaggatcggcagcacgtcggacagcgccagcggggtgtcggcgtggtacagcttgcaatgcagctcgcgctggccggaaacctggcccagcggctgatagaaactcatcaccagcgggttggcctcggtgaggctgagcaagtgctgcatgtcgaccaccgccgaatgcgcggcaaagcgctcgcggtaaccggccgggaagcctttcgggaagtccgccagcacgttggtgccatgggcttcgccgaagctttcgacgacgaggctggagtagtcgtcctgccagctgcggcaggcctgcaccacttctttttccagttgcagcgggtcgatgtccaggcggttcttcgggtctacccgcagaatcagctgcacgcgggccagcacggactcggagaagaaggtccagaactcgcagtccgaagccttcaggcgatccatcaatacttgctggatcttctggcgcacttcggtggaatagatgtcgcgtggcacgtaggccaggcagtagcagaatcgaccgtacgggtctttgcgcaggaacacgcggatcttgttgcgttcctggatctgcacgatcgacatcacggtgctgaacagctcgtcgaccggggtctggaacagatcgtcacggggcagcacttcaacgacttgcgccaactccttgcccaggtgcgccttgggctggaagccggagcggcgctcgatttccgcgaccttgcggcggatatacggaatcacccgtacgctttcgccgtacaccgacgaggtgtacaggcccatgaaacggtgttccttgatgaccttgccatcggcgtcgatttcacggatcgacacatagtccgggtaggctggacggtgcacgcggcttgggtgcgcggccttggcgaacgaaagcatggtcggttcacgcaggtaggcgacggcatagtcttcgatacgcaggtcttcggcggtgagcccggcgcgcagcagtttggtcagaccgaggaaggagtcggcgtcatattcgatatgaccgccatccgcctcgtcacgtaccacgaactcttcatagccgaggaaggtgaagtggttgcccaccagccattccaggaagttcttgatctcggccttttcttcgccgtcgatggcgaactggcttgcgtcgataccggccagcaggtcctggaccttggctttcatcggctcgaaatcggccacggccacacgcacttcacccaacacctgctcaagctctttgctcagcacgttcagttcggcggcgttggcgcaacgatcgatttccaggtacatcagagattcttgctggatgccttcgccctgggtgccttttggcaggatttccagcaactcgcccttggcgccacggcgtacgctgagcacggtggtctgcaaggtgtggatgctgtagccacggcggttcagctcggtgcggaccgagtccaccaggaagggcaagtcatggtgcagcacttcgaccgcggtgtgggtcgactgccagccatgacgttcgtaatcggggttatagacccgcacttgcggttgggtgtgatcaaagcgctcaagcaggcgccacgcagagagggtgcaaccggccaggtcggaaaggcgacgctgggtcagttcgtccagggaaatgatgccgaagaattgttcagcgaacagcgccacttgtggcagtgcctgttcactgatgtgctgcgccagtgccgcttgcagttgatgctggaagtcggccttgctggctgcggtgaaaaacgccatctgtggtactccgctcgggcttgttattgatggaagcgtcgcgtgttatccccttgcggggagaccgtcagcgctgttcgctgggtgacgagtaaagcaccataaacgaatcagggtgacaggtgggtgaagctggacaagacaatgaggtcacatacaacttccataagatgtgcacctagccgggtgacggtacgacgggcaggtcaggcgccaggctcgtgcacatccgttgcgcagcttaacgagtgtaggaagccagctgcttgcgacgctgcgacatattcggtcatcggtaagcaggcgccgggttgcgacttgggcaacccgtcattcccggcagaaaatccggctacttcgacgccggcgagtatcagaaatgaccgatgttgcccgtcaggtcatgcactgggtctgacacaggaagcagcacaaaattcgccgcaatggcacaattgcccgcatcacgccctaccccagacaggattgcccatgctgcaactgaaaaccgacgccctgatggccacgccgtgcgacgacgaagaagacaacatggccatgctctgctgccacggcaagaacggcgagatgttcatgctcacccgttacccggacgaagacgaagtggaattgacctgggactacgagccgtcgacgctggatgggctgaaggtcacgctgagtgacaccatcctgctgatcgaactggctgccggggatgccgatgccctgggtggcaaggaccagttgcagattacccacgccaccgctgcgtcggacctggtcgaagtcgagcaaaccctgcaaaacatcctgaaaggcaccggcactttcacccgaatttaaacggcacccacaatcaaatgtgggagggggcttgccccctcccacatcgaccgtgttcccacacaaatttcctacaagatttgccaaaaatacccgtcacgccgttagtcgccacccccctccatgcattaaagtagacgccccaggccttggcatttttcacaaccccaaggctcatctctccaggaaccgtcatcgatggaacatcgtgaagcgctgcttgcgctgcgaacctttctttctacgcagattctcggccaggaaaaactcatcgatcgcctgttgatcgcgctgctcgccgacggccacatgctggtggaaggcgcgccgggcctggccaagaccaaggccatcaaagagttggccgaaggcattgaagcgcagttccatcgtatccagttcacccccgacctgttgcccgccgacatcaccggcacagagatctatcgtccggaaaccggcagcttcgtgttccaacaggggccgatcttccacaacctggtgttggcggacgaaatcaaccgtgccccggccaaggtgcaatcggcactgctggaagccatggccgagcgccaggtcagcgtcgggcgcagcacctatgacctgtcgccgctgttcctggtgatggccacgcaaaaccccatcgagcaggaaggcacctacccgctgcctgaagcccagctcgaccgtttcctgatgcacgtcaagatcggcttccccgacgccgccgtcgagcgacgcatcctgcaacaggcccgtggcgaagcgctcaacggcgaaaccaagccggaacgccgcgtcagccagcaggcgatcttcgccgcacgcaaggaaatcctcggcctgtacatggctgacgccgtggaggaatacctggtgcagttggtgatggccacgcgcaccccggccaagttcgacccggagatggccgagtggatcgcctacggcgccagcccacgcggctccatcgccctcgaccgctgcgcccgtgcccatgcctggctggccggtcgcgactttgtcagcccggaagacatccaggcggtgctgttcgacgtactgcgccatcgcatcatcctgtcgttcgaagccgaagccgccggcatcgaccaggaccgcgtggtgcaacgcattctcgacgtcgttgccgtcgcttgaaacccatgaacgccagcgatggggtccgcgtcacgctcagcgagttgatcgagatgcgccatcgcgtgcgcgaagtgcagctgttttccaccccgagccagcgcagcccgttgatcggcctgcaccactccaagctgcgcggacgcggggtggacttcgaccaggtgcgcgtgtaccaggccggggacgatgtgcgcaccatcgactggcgcgtgacggcgcgcacccaggagccgcacaccaagctgttccatgaagagcgcgagcggccgatctttatcatggtggaacaaagctgccggctgtttttcggctccgggcagatgttcaaggcggtgctcgcagcgcaggcagccagcctgatcggctgggccgcgctgggccacaacgaccgcgtgggcgggctggtgttcggcgacagcgagcactacgaaatcaaaccccggcgcagcaaacaaagcctgctgcaactgctcaaccgcctggtgcgagtcaaccagagcctgaataccgagagccgccccgaagccgacgccctcggcatggccctgcgccgtggccgcgaagtgttgcgccccggcagcctggtgattgtgatctgcgacgaacgtgcgctgaccgagggcgccgagcaacaactgagcctgctgtcacgccactgcgacctgctgctgctgccgatctccgacccgctggaccacgccctgcccgccgccgggctgctgcgtttcgccgaacgtggtgcgcagttggaactggatacgctcaacttcgacctgcgccaggcctacaaggcccaggccgaagcgcgcattgcgcgctgggaactgctcgcgcaaaagctgcgtgtgctgttgatgcccttgagtacccagagcgaaatggtcgagcaactgcgtgaatacctcaacccgcaacgcccggttaaaaaacaatgagcagcctggaccaactgcagccgctgatcgccccgcccgccatcggcttctggccgcctgcgccgggttggtggctgttgctgctggcgattccgctgctcggttggggcctatggtcgctgcgccgcttcctgccggcccgccgccccgtggcgcgcgccgaacaaccgctggacccgctgcgcattgccgccctggcggaactggcgctgatgcccaaaccctacgacggcgcgcctgccggcgcctggctgcaacagctcaacggcctgctcaagcgcctgtgccgcaacgactacccctacagccagagccacaccctcaacggccgcaaatggctggcattcctcgacaaccgctgccccgccgccggcctcacgcgctggatggtgttggtggaaggcgcctacaaacccgaatgcaaactcgacgacaaggccatcgccggcctgacccaagcggtcgatacctggattcgcaaacatgtttgaattcgcctggccgtggatctttgccctgttgccattgccctggctgatgcgcctggtgctgccggcagccgacagcggtgagcccgccctgaaagtcagctacctcagcgacctcgaaggcctggcccgccgccgcgcccgcgtcaacctgccaggctggcgccagcaagcaccgttcgtggtgctgtggttgctgctgctgaccgccgccgcacgcccggaatggctcggcgaaccgctgcccatcgccgccagtggccgcgacctgctggtggcggtggacgtgtccggctcgatggattttcccgatatgcactggcaggacgaagacgtgagtcgcttgagcctggtcaagcacctgctcggcgattttcttgaagggcgccaaggtgatcgcgtcggcctgatcctgttcggcagccaggcctacctgcaggcaccgctgaccttcgaccgccgcaccgtgcgcacctggctggatgaagcgcgcatcggcattgccggcaagaacaccgcgattggcgacgccatcggcctggccttgaaacgcctgcgccagcgtccggcgcagagccgcgtgctgatcctggtcaccgacggcgccaacaacgccgggcagatcgacccgctgaccgctgcgcgcctggcggccgaagaaggcgtgaagatctaccccatcggtatcggcgccgatccggaacagaccggttccctgggcatcctcggcgtcaacccgagcctggacctcgacgaaccggcgctcaaggccatcgccgaagccactcatggccagtacttccgcgcgcgcgatggcgaagagttgcaagcgatcaagcaaaccctcgacaagctcgaacccgtcgaacaacaacccacccaggcacgccccgccctggccttgtacagcgcgccgctggccctcgcgctggtgctgagcatgttgctggtgatccaggaacgttggccgaacaacgccctgcaacgcgtgttcaataaactgtcgagcaagggcatgttcctgcagcaacacccggaatggcgccaacgccttaaacgcctgcgtttgcggaggcgtcgatgatcgacctgtggccgcactggttccgtccctggtggctgttgctgctgccgttgctcggctggctgctgtggcacctgtggcaccggcaaaagcgcgccgggcgctggcagatgatcttgccgccggccttccacgcggtattgctcagtggtggcaacggccgcgagagtaaatcgccttgggtggtgctcggcatcgcgtggctgttggcggtgctggcgttgctcggccccagttggcaaagggttgaacagtccagccagaagccgtccgacccgttggtggtactgctggaactgaccccggaaatgctcgccaccgacagcccgcccaaccgcctggagcaggcacggcgcaaactgtacgacctgttgcaggcgcgcaccgacgcgcaaaccgccatcatcgtctacgcgggcagcgcccacacgctggtgccgctgtcggacgacctggccaccagccgcaacctgctggaagccttgcgcccctcgatcatgcccgaaccgggccaccgcgccgacctggccgtcgagaaggcgctgggcctgctcaagcaaggcggcctcggccaggggcgcctgttgttgatcggttcttcgttgtccaaacaggagcgccagggcatccgcctgctgctgcaaagcggccaggcgccgagcttgtcgatcctcggcatcggcagccgcgagggcacgccggtgacccaggagagcggcgaattcctcaaggacgaacaaggcgcgatcctggtgccgcgcctggacagcccgaccctcaaggccttcgccagcgaaatgggtggccgctaccgcgctgcgcggctggacgacaaggacctgcgccagctcggcgtgctcgacccaccgcaagccctgcgcaacgatggccagttgctgcacctcgacacctgggccgaccagggttactggctgctcctgcccctgctgctgctggccgcctgtgctggccggcgtggctggctgttctgcctgccgctgctgttgttgagcgcgccgcagcccagctatgcgttcggcttgcaggatttgtggttgcgccccgaccagcagggccaatatctgctgaagaaaaaacgccccgccgaagccgccgaacacttccaggacccgcaatggaggggcgtggcgctttacgaggccggcaactatgccgaggccatcaagctgttcgccgagggtaatgacgcctactcccactacaatcggggcaatgccctggcaaaatccggtgaactggaagccgccatcgacgcctacgagcaagccctcgaagcccagcccgatctgcaaccggcgctgaaaaacaaagcgctggtggaaacccttatgcaggaacaggcccaaccggagccgcctcctgcggcaaaaaacgaggatgacgaaaccacccaacccggccaaactgcgcaaccgggcggcacggggcaaaacgccacggggggcgaacagtcatcccaaggccagggcgaagccggcactggcgacacccagcccggcaacacgccgcaaaccgcgggcaatgaagtgccgggcagcgaactgggcgacgaacagaccactaccccgccgctgcggcccaacgatgccagccttgacggtgaacatcgccaggccctggagcaatggctgcaggagatcccggacaaccccggagaactgctgcgccgcaaattctggtacgaacagcaacaacatcaggacaagactcgatgagccgccgcaccaccctactgtttctgctcgccctgtcggcaggccacgcccaggcggcgagcctggtcgccagcgtcgaccgcagccgcgtcaactccggggaaacggtggaactcacggtggaatccagcgacgtgacccagttcggcaagcccgacctgtcgccgctggatgcacagttcgaagtcagcggcacgcggcagatcaaccagctcaccacgctgggcggcgacaaccacgccaccacgcgctggatcatcaccctgctgccccgggaaaacggcacggtggtcatcccgcccctgcaagtgggcgaacacaagacccagccgatcagcctgcaagtggtggaaaccgccagccagaacactgctgccgagctggcgccagtgtttgtcgaggccaacctcgaccagaccagcgtctacgtccaggcccaggcgctgttgaccgtgcgcgtctaccactcggtgtcgctgtatgacgacagcagcctcacgccgttgcagattgccgatgcacgcgtggagcagttgggcgagtcgcgcacctacgaaaaggtcatcaacagcatccgccacggcgtgatcgagacccgctacgccatctacccgcagcacagcggcacgttggcaatccctgcgcagactttcagcgcgacgctggtggaatcgcgcccaccccaggaaaacaccctgcaaggcaccaagccgggcaagttgatccacgtgagttccgcagagctgccgctggtggtcaaacccaaaccggcgctgtaccccgccgatacgccgtggttgccggcacgcagcctgaccctgagcgaaaactggaaccccgaacccgagcacgtgcaagtcggcgactccctgacccgcagcctcacggtcaaggccgaaggcctgtccagcgcgcaactgccggcactgcccagcaccgaagtcaacggcctgcgccgctacccggaccagccggtgctcggcaaccagaccaacgaccgcggcctgatcggcagccgcgaagaccgggaggcgctcgtgcccacccgcgcaggtaacctggaactgcctgccgtggacgtggtgtggtggaacacccacgaagaccacctggagcgcaccagcctgcccgcccgcaccgtgcaggttgccatcaacccgagcctggccgtggatacccccgccacaccgacggtgatcaccgcaccggacgatgagcgcctgtggctatggcaactgagcacgctgatcctggcctgcaccaccctgctggggtttggcctgtggtggcgtgcacgtcggcaaccggccgtgcagcgcgccgcacaaaccggcccgagcccgcgcaccctgctcgatgaccttaaacgcgccacccaggccaacgacccccaagctacccgccaggccctcgacgcctgggcgcggcaacagccggaaaccctggcggatatggcggcgcggtttgtgccgctgtcggacgcgttggacgggctgaatggtgcgctgtacagcgagagtgggcatttctggctgggagaggacttgtggcgtgcggtgaaggcaattccgatggctgagcgtgaggtggatccgacggcggataccaccagcttgccgccgctgtatcccaagtagccaaggtgactacttaagataggacaggcgtggccgataaagcgatgtagctttcgattaatggagttttttaaaatggccattacgttgaatgtttcctatccgcctttaagtaagcagacagacgcttacgccatcaaaaacccgcagcaagtcacgaatgccttcactattaccgaagcctccgaggcggcggatacattgaagcttggcgatcaggagaagatcagtcaacttaaggagtttttgaaagattatgatatgacgtcaatcagtacggatgagcttaagaaagtcggtagaaggctctacgatgacggaatgatcagccaacgcgcttttgggatgttcatttcgggtgatggtgcatcagatgccaatggtcgccaaacaaacacccacgtaaaatttaatgccattgccctattcaacgagaaactggaagatacgcgggcttttttcaaaagtgaaccaatggttgcaatgcaagacggtgccatggatcacttgcaagggatggtcagcgcaaatcaagctgttggtgcattggcgtattttgtcaagtccgctaataatgatttatcgataaatgagtacgcttgaatttgatttatgagtcaaggcgcgccaggttcaacctgacgcgccgcctgctcatctagcgtccgtatctcaccgtacctgaataggatttagacgcgctggtttcgtttttcagccttacacgataggtaccgaatggccccacgtaagacgcgttagtgccgatactgaatgacactctgctccaggatgagcctacttcacgctcgataaaaatcgccggagcacttcccgctcctcccgctgaaaccgttgcatcgatattcgcggcagaacagccattggctccggttattttaaatggaccatataccgtaatctcatcattgggctgcattatcccggtataactatcagcaatattcaaacacaacgcagatgcctggaatgaaacaagcatcaatccagcaagcggcaatgcaataaggcttttcataatagtctccatcagtattaagaaaacacaaaagcgcatcacgcaaggagcgcgtcaattgaccactccacgcttgccagactgcatgaattatttatcaaagtaagccagccgcttcctaaattctggaaggaaaggcctgtcattttttagtgtaggaacaagtaaggcgcgtcctaatcctgcctcccacttataagatcggtatttaatagcattttactttgcgtttttttcagataaatattctaacccttggcacggggcggtttactcgcgaatgcggtgtgtcagatagaaatgcactgcctgacccaccgccacccggagcaagccccctcccacattgaatctgcgtcgcctgggggcagcagggtcgcattacaggtaaactcccctccttttcatctattccacggagttcgccttgcgtctgtttcacacctccgactggcacctgggccaaaacctccacggccaggaacgcgacttcgaacacgcctgtttcctcgagtggctgctgggccaactcaagacccatcagccggatgctctgctcatcgccggcgatatcttcgataccgtcaacccgccgctcaaggcccaggagcggctgtatgacttcatcatcagcgcccacgaacaaaaccccaagctgaccatcgtgatgatcgccggcaaccacgattccggctcgcgcatcgagctgccggcaccgctgatgcgccgactgcgcactcatgcgctcggccgcgtgttatggctggatgacggccagctcgacgccgaacgcctgctgatcccgctgcccgatgccaaaggcaagattgccgcctggtgcctggctttgcctttcctgcgcccggcggaagttaccggcgcgcacctgggcgacgattacctgcgcggcatcggccaggtgcatgaatggctgatcgctgcggccaatgccaagcgcaaaaaaggccaggcgctgattgccatcagccatgcacacatggccggtggttcggtgtcggaagactccgagcgcagcctgatcatcggcaatgccgaggcgctgccggccagcttgttcgataaaagtgtcggctatgtggccctcggccatttgcacaagccgcagaaggtcaatggcgaagagcgtattcgctacagcggttcgccgatcccgctgtcgttttccgaaatcggctacaagcaccagatcctcgatgtggtgttccagggccaatgcctggtgagcgtcgagcccatcctgattccgcgttcagtcgacctgcaacgcctggaagccgtgcccctggccgatatcctcaaggccctggccgagttgccggacatcgacctgctcgccgaaacccaacgccacccctggctcgaagtgcgcgtcctgctcgacgaaccgcaacccgacctgcgccagcaaatcgaagccgcgctgcaaggcaaggcagtgcgcctggtgcgcatcgccgccgagtacgccggtaaaggcccccgtgaagacgaaggcgacgaccgcctgatcgaactcgaccagctcacgccccaggaactgttcagccgcgcctggcaggacagctatggcagcgaggtagatgaacagaccttgaaggacttcgccgtgttgctccaggaagtgcagcaagagggggaacagccatgaagatcctcgccatccgcctgaaaaacctcgcttccctggccggcccattcgagatcgacttcaccgccgaacccctggccagtgcggggttgttcgcaatcaccgggccgaccggcgccggtaaaagcaccttgctcgatgccttgtgcctggcgctgtttggcgccgtgccgcgcctgggtgataccggccaggcgaagatgccggatgccgacagcgacatttccatcggtgacccacgcaccttgctgcggcgtggcaccggcggcggttatgccgaggtggattttgtcggcgtcagtggccgccgctaccgcgcgcgctgggaagccaaccgcgcccgcgacaaggccagcggcaagttgcagaacagccgccagagcctgatcgacctggacagcgaccaactgctggccagccagaaaaccgaatacaagacccagctggaactggccctgggcctgaacttcgaacagttcacccgcgccgtgttgctggcgcaaagcgagttcagtgcgtttctcaaggccaacgacaacgagcgcagcgaactgctggaaaagctcaccgacaccgcgctgtacacccagcttggccgacgcgccttcgacaaggccaaagaggcccgggacgcgcacaaacagttacaggaccaggccaccggcgtggtgccgctggccgctgaagcccgtgccgaactcgatcaacaattcgatgccgcgcagcaacacctcaggacccagcaggcccaactcaagcagctggagcttcagcacacctggctcaaggaactgcgcgaatggcaggaacgccaactcgccgccaccgagcagcttcagctggcgcaggccgagtggaataaccaggacgcgcagcgccaggacctgagccgcctggaacagttggcgccgcagcgtcatctgttcgtgcgccaggcggaactcggcacacagctggcgccgttggcggcgcagattcagtcgcatacccggcaacaagacgaactacacacccgccaggaacaggcccggcaccaacaaaccaacgcgcaaaccgccctggctgaagcgctgaacaaccaggcggatgccgcgcctttgctgcgccaggcgttcgacgaacaaagcaccctcgcgcacttgaccaaagagctggccaagcgcaccgaggacaaacagcggcacgcaagcgcctgcaccgaaggccaggcccagctcactggcctgctggaaaaacagcaccaggtcgcagagcgcctgcaacgcctgagtaccgagcttgagcgcagcgccgcccttgcgccgctaagtgatgcgtggaccgcctaccgcgaccgcctgcagcagctgatgctgatcggtaaccgcctgaacaaaggccaggccgaactgccgcaactggagcaacgtgcaagcagcgccgctgaacagttcacccagcaacgcgaagccctggacttgctgtatcaggaggccggtgccgagcctcacgccgtggccgagcagatccaattgctggccagcctgctgcaagacaatcgcaaacagcagcgagccttcgaagacctgacgcgcctgtgggacaaccagcaacagctggaccagcaagccaccagcctgacgcaaaagctcaccacggcccaacagcaacgcgaacagttgaaccagaccggcctgcacaccaaggccgagctgaccgtcgcggaacagacgctgaacgtgaccaaacagctgctggaacgccaacgcctggcccgcagtgccagcgtcgaggaattgcgcgagcagttgcaggacgaccagccctgcccggtgtgcggcagtcacgaacacccgtaccaccagcccgaagccctgctgcaaagccttggtcgtcatgacgaaaacgaggaagccaccgcgcagaacgcggtggacaccctcaaggagaaactcaccgagttgcgtggcgaagtgggcggtttgatcgcccagcagaaggaatacctgcaacaacaggaacacctggcgacgcaacagcaagcgctgaaaccgagcctggatgcacacccgctggccgcatcgttgttcaaccaagaggccgccaaacgcagcgcctggcttgagcagcaactgagccaactgacccaaagcatcagccaggacgaacagcgccaaggcgctctgctcaacctgcaacaaaatgccgggcgcctgcagcagcaactgcaagccgcccaggaggcaagccagcaggcccgccaattactggtcgaccagcaacgcgagttggccagtgaccgcgaacgccttgagcaggaactgagtgccttcgccaacctgctgcccccagacaccctggcaggtctgcgcgccgagccggccgccaccttcatgcagctggaccagcaggtcagccagcgcctggaacagctgggccaccagcgcgacgaattggccgagcaacaggaacgtcaacaggcgatcgagaaggaacagacccaccagcagcatcgccagcaacaactcgacgccctgctccagcaagtcaccgagctggcgagccaacagcaaacggctcaggaaaaactcagcgcgttgctcggtgagcacaccagcgccgaacagtggcagcaacagctggatcacgccgtcacccagtcgcgccagagcgaaaccgacaccaaccaacaactgcaggacatccacaacgcgctgatccaactggccgccgacctcaaggctcagcaggaacgcgaacaggcattgcaggccgaacagcacagcctcgacacgcgcctgcacgactggcgcgccctgcacccggaactcgacgacgccggcctcgaccgtttgctggcctacgacgacgcccaggtcagccacttgcgccagcagttacagcacagtgaaaaagccgtcgaacaggccagggtcctgctgcaggaacgtgagcaacgccttgccgagcaccaggcccaacacaatggcaacctcgcagccaatgagctggacaccgccctggccacactcaaccagcaattggccgaggccgagaaacactgcgccgaactgcgcgcgcggcagtccgaagaccagcgtcgccaggacgccaaccaggcctttgccgagcagatcgccaaggcgtatgacgaatggcaacgctgggcgcgcctgaacgcactgatcggctcggccaccggcgacaccttccgcaagatcgcccaggcctacaacctcgatctgctggtgcaccacgccaacgtgcaactgcgccaactggtacgccgttaccgcctcaagcgcggcggcagcatgctcgggctgctggtgatggacacggaaatgggcgacgaactgcgctcggtgcactcgttgtccggcggcgaaaccttcctggtgtcgttggcgttggccttgggcctggcgtcgatggcctccagcacattgaagatcgagtcgctgtttatcgatgaaggcttcggcagcctggacccggaatcgctgcaactggcgatggacgcgctggacggtttgcaggcccagggccgtaaggtggcggtgatttcccacgtgcaggaaatgcacgaacgcatcccggtacagatccaggtcaagcgccagggcaatggtttgagcacggtggaggtgaagtgagcgaagcgctgctgtattcgttccggcgctgcccgtatgcgatgcgggcgcgcctggcgttgcgttattcaggtgtgcccgtgcagatcatcgaggtgagcctcaaggccaagccggccgagatgctggcgctgtcgcccaagggcacggtgccggtactgagcgttgacggacgggtgattgaagagagcctggagatcatgcaatgggccctggcccagcacgatccggatgattggctgctgcagggtgacccggcggtactggcactgattgccgagaacgaccagggcttcaagtatcacttggatcgatacaagtacgccgaccgctacccggaacacccgatggaacactatcgggccgagggcgcggtgtttttgcagaagctggaaggcttgctggcggaacgcgcgtacttgctggcagagcatccgagcctggcggacatggccctggcgccgtttgtgcggcagtttgcccatgtggatcgggagtggtttgccgggacgccatatcaacggttacaagcctggcttcagcgcgtccttacttcaccgctatttatcgccgtgatggcaaaaccctgaggccggcacaatcaaatgtgggagggggcttgcccccgatgacggtggatcagtcagctaatctgtagctgacccactgctatcgggggcaagccccctcccacatctgatctcagtgatctaccgcttagtgctgggtcttgtgatccagtgcggcgtagaaattggcgctctgttgcaggtatttctgggtgtaggcgctggtgctggattttttgccggtcacttccacgctggctgcggcaggcagggcaacagtggcagaaacagcggaagcggcgatgatggagaagaggttcagattcatggcggtaacccttgtgttcgtttggttgagtggccggggaaggccttggaaccaaacttacgcccgagggctgaaccttagaaatgctttgaaacagtagccgctattaacagaattaatagaaagggtcaggccccgcgcggcggggcctgtggcttattgacgcaccaggaacttgaggtcgctgggcgcatcaatcggcaatttctgcacggttttacccagcaggccggtttttgggtcgcgttcgactacgacgatttcgttgcttttctgattggcgatcagcaggaaccgaccgctggggtccaggctgaattcgcgcgggtggtcaccgtccaccgagcgacgttgcaactccttgaggtgcgcggtggccgggtcgatgctgaacaccagcaactggttggccgtgccacggttgctcacgtagaggaatttgccgtcactggaggcatgcaacgcggcaccggccttgtcggacaccggctgcccggcggcgaagtccaccagttgggtctgggtcaactggccgtccttgtagtcgaacaccgccacctgcgcgctcatctcggtggtcaaccaggcgtgcttgccatcagcgctgaacaacaggtggcgcgggccgctgcctggcggcagttgcaccgaggccgggttggccggggtcaatggcagttcatggttggccttggggtcgtagcggtaggcaaacaccttgtccgcccccaggtcctgcacaaacacgtacttgccatccggcgacgacaccaccgaatgcacgtggttcgacgcctgccgctcagggttcacgcgactggccgggtgcccactcagttgcaccggaggcgacagcttgcccgtggcgtcgaccggcagcaccgccaggctgccgcccgggtcttccaccaccgaatagttggcgaccaataggtagcgcccatcggcggccacgctggaatgggtcggctcattgcccaggctctgcacctggttgaccagggtcagttggtgagtctgcggatcgatgctgtagctgcttacgcgcccgaccgggtctttctgcccgggaccgttctcgttgaccacaaacaggtgcttctggtccttggagatcgtcagccaggacgggttggccgctttggccgcgagcaccggtttaccgctgaattggccagtacggctgtcaaattgcaggcgatagatgccttcgctgctgccggcggtgtagctgcccaccaacagttcataggtgtcggccggcgcagcttgcaccgacatcgcgcccacgctgccggccatcagcagcggccagaatttacgcatcatcatccgcttcatcctcgtcgttattgttgccggtgaaggcgcgcatgcagatcaggcggtgctcgcccgaatcaccggtaagggtccagctttgcaaggtgtcatcgaacgtcgcggcgtttacctgttccaggctgaagcgccagcgtttttctgcacggccgtccatggcggtgatcagcaatttttctttatcgagttggaaatcgaaggcatgcagcccatcgatttcaagcatgtcgctggtttcaaggacggcaggcaaattctcagtcatcacagtctttcatcaggttcaaagcgctaatcataggccagtttgctgccggggcctaaaaccatagcgggctaccgcatgctggcaacgccgggcattaccttgcaaggacgcattcttatccgacgtaaaggaattcccatgcccgcacagcccaataccccagcggcaaaccccacacgacaagcggttgaagcgcagtttctcgggcgcccgacgttgcgcaccgtcaccgcgcaaatgctgggcacccacctggtggaaaagtacccgcccctgacgctgcccgtcaccgatcttcggctggccgtaccccgcgaaggcggtggccgagtcttgctgcctttgctggacgtcgcgctgaaccatatcgccgacggcagttttcccgaattgacggcacgccagaacctggattgctacctgagcgatgcaaccggcactcggctcagctatcaggtcaacggagatcgtcgcgacttcgacctgcgggtcatcgaggccatccttcgggagctacctcacgtactgttcatcggttttcaagaagcactggccgcgtattggggacaagacagtgacgcagggggcagccgctggaagtggctggccgatgtgctgcagggcgtgttgctcgacgtcgccacgcgccagaccagcgtcacggcgcaacaccttgaaattctcaacgccttgaaccgctatccagaccgggcaacccgtgcgctcggccccgcccccgcgaacgaggtccacgcctacaccctggaaacgcatttgcagcgctcgggcaagcggctcaccttccaggccaccgagatcctggtggttcgcgcagagcaggtgttgttgtatcgcttatccggtgaggttgagccctaccccgacctggacaccttcggccaggcatggggcaaacacgtgcaacagcgtttcactgccgaccagatcacctggcagcagtatgagccggacgggaatatttttgaggtacaggccgcgcttatccttaaccagcaactggacgatctcgccgccctccaactcccggcccaaacgacggtacaagcgctggaagagctgtttgcggtgaccaccgatcccgcgcagtggctggcccaatccagcgccacgccgctggcaaccctggcatccatccaggcagccctgccagccactctgcaagacgccagcgcggccaaccggatggcctaccgccaaaacctgctggaacacgccaacatcaagcgccaggtcctcggcgactcagacttcgatagcctggaaaccctgcgcggttatgccaccgcgcatttgaaccaacagttgtgcatggaccgcgccgttgcccacggctggcagcgtgcctgcacccttgaggcgctgtctgccggctaccaggccgacgatctggaactgacctttcatgtgccggtgggcaccctcgaagggggttacattgaaccggtcgtcatgagcctggttgacctggcgctgaagaacctgtccggccgccccaagggccgcatgaccgtgcgccaccgcacgggccgcgagatcgaaacgtggttgacgcccgactacctgcttaaactggtccagcgtgttgatatcggcaaaaactatcccgcctacctgcgccgagagctgatgggggatacccaggccgcgcgtaaacgccaacagctgttcgagcaactacggcccattcatttaaagacccacgcgctggagtgcttgatcaatggccaggcgggcctgactcaacgcggctttcactgtgtcaatgcactggtaaaccctaacccgctggaacgtcgggttggtgacgacgaaattgtgatccgcccgctggcctttgtacgtaaaccaggcgccacggccgatgtcgtgcgcaacatgttcatcattgaaccgcgcaatacacaatcaggcccgcacttgctgtatcgcccggcctatcccgatgcattgttggagtacgccaaccgcgaccaactgctggccgccatcgcgcaaccgggtaccctgcaggacagtgtcctgacctggatgactgacaacgccagaggcatctacagccacggtggcttcacccagcctcactctgtacgcgtgggtatcggttcggagttcgatagcctgcccagcgtgcccaagcccgcagagctgacgcgcgccgacgacgaatgcaacgacgaactgcttcaggcgctcaacagtggcagcctcatggaatacctgttcggcagtgaaacccgacaactgttggatcaggctgaacaagcgtccacatccaacagcgaaagccgctgggcactgatcctggaaggcctgcaactggggttcaacacactactgctggtcgtgcgtggtcccttggcggcaatcggctggctgatgcaggccacacaaagcctggtgaaagacctgccggcactggaaagtgacgatccgaccgccagggagctggcgtgggttgatctgctgctcaatgtcggcatgctgctgttgcatcacggatcgctcagcgcaccccgcgaaacgcctttgcgcgctgaacgcgccacgactcccgcgccgttccaacgacgctggcctggccaatcaatcggtcgatcggctgtggttgaacggggggctgtcgggctgccttccgaaccgcccggtggtggccgcaccttgttggactttgaccgctcattggcgggcgacggcgcatcggccaggcttttgcagaagctgctggccgtcaacgtgccctggccaacccccattcccgagccggtttcccttgggatgtatcgcggcttgtactcgatcaaccgccaatggcatgcctcgctgggcggcctgctattcagggtcagcatcgtgccgggttttggcgaggtcttcattattcatcctctgaagccggaacacccgggcatccagctgaaaaccgacggccgcggccattggacgctggaccgggggctcaagctgctggggggtggacgcaagcgagtgcaagagctgcgcaatgaaaagcagcttgagaatgaaaggttgcaggcgcgcacgctccaactcgttcaggaagcgcagctcctcacggcgccgatcgatcaagcaggcgcccagttgccacccgccctcaaaagcctggagaaacaactcaagaccctgcaaatcattcaggatctgctgcttaaagcttccgatacacaacgcccgagcctggaagtacgccaacagactgaagtccaggaatacaagcgcctgcgcaatcagttcgaaacgctgctgcaaaacgtcgaaacccaactttcccaagccttgcccgtgcgcttcgagctagccaccttgacccgtcaactagaggccgccgcgattgctgacctgcccctgatcaatccatcaaccatcctgaaagaggtctggaatcaacagttgtttctgcacaagatgcaattggaagcgttgggattccataccgcgaccgaagcgggcgaacccttggaggcgtggaacaaacgcatgcagccacgaatagtggcgggagacttggccctcgtcgacgaaaacctgcggatggtcacgggttatatcgattacctcgaacacatggccgtgcattccgccacgatggaagccacccttgagtaccttgggcaagggtcgggggccgcgcgggcagtgcgtcaagaactgctggcaagcattccagtggttgaattgtttttctccgacaacctgaaactcagtgctttggaactgctgaccggcctgagccagctacgcttcaagatgcattcacaactttctgcgttgcagtggtattacaaggcccgttatcaagtgtccgggctggacataagcctgaaatcccacctcgaggtacgtagcagctccgagtacccactggacgagcaacgcaatgtctacgagaccgtcctcgacaaataccagcatgccgaattcgccctccaagccctcaagagcctcaaatccgacgctttaggcccggaagccgagcgtgtgctcaaaggccttgaatacgccaaggcgttggcgcaaaacgaactggaatcggtggttagagagcaggaagacctcaaggtcgaactgccgttatccaaaaccctgcgcgccaagcctgcggcaaagcgcgtgttcaagacccgtaaaaaggaatacctgatcggcgaactcaagcccgccgacgcgcaaaatgcccaggagcacatcaccatctccgacacattgctgggtaaaaccctggcttcgtataaccagcagacggatggctgggtctccatcgacgaggaagccagccctgtgccggccccacaggctcgctcactcgcggcgctcaaaagtgaagcccaggccttgattgaacagcgccaggacctggaacaactggtcgcggcggaccaggcgaagctggactcccccctcacccgccaggacgccaaccccggcgaatgggataagttgctcaacacccaagccaacaaactgaccgagctcgccaacgaaataaaacgcgaccatttcaacgcgcctaccgcccagaatctgatcgatgaatgcctggcacaggccaaggacatcaatcgctgggcacaacgtatctgcagcgaagcctacaaacgccagtggccgacaatggaaagcgtcgcttacctctgggaccaccagcagatcgatatcaacctcaccagccaggccgatccgcaacgcccgaccctcagtggcgacttcttcaccgaatacgcggtgtacgacaaggcgcaaaagccaccggtggtgctgtggtacgcgcacttccactatgctgccgctgacgctccacccgcgaattacacccgggcgcatctgaagttgccggagcaacgcaaactcacccagaaggatttgctcaaggcccatgtgcaggattatctgagccgtgtgaaggaccccgacaacgcaccggtgaccaaaattgtctatgtgctgatcaccccgccactggacaacctgttcctgaagatagcgcccaagcccaacgttcagtaaaccactggatgagaacctgttcctgaaacggtaacccgcaaaaaagccgcacactgtgcggctttttcaaaacgcgacgactcagtgcgcaaacaacgagttgcccttctgccccgccaacttctccggcttgatcaggaaccgcgccagcgccggcagcagccacaacgcaccgaacatgttccacaacagcatgaaggtcagcatcaggcccatgtcggcctggaacttgatggccgagaagatccaggtgcacacgccgatcgccagacacaggccggtgaacagcacggctttaccggtggacttgagggtctggtaataggcttcttgcaacggcaaaccggcacgcaggaagctttccaggcggctgtagatgtagatgccgtagtccacgccaatccccacgccaagggccaccaccggcaaggtcgcgaccttgacgccgatacccatgaacgccatcagcgcgttgcccagcaccgaggtcagcaccagcggcagcacgatgcacagcgtcgcggcccaggagcggaaggtgatcatgcacatggtcgccacgcacaggtacaccaggatcaggatggtcagttccgactccttgatcacttcgttggtggccgcttcgatcccggcgttaccggcggcgaggatgaattccaggccgtccctgttgttctccttggcaaagtcctgcactgcatgcaccgcacggtcgagggtttcggccttgtggtcattgaggaacaccagcaccggcgccagcgagcaattgttgttgtacaggccatcggcacgggcgatggagttgttcagcacatccgggttgcgcgacagggtttcccatttcaggttgccttcgttcatgcccttgatcatctgcttggacacggtcaccagcgagatcgccgactgcacaccttcggtgttctgcatcttccacatcaactggtcgatgggcgccatggcttcatagcgcgagcagccttcggccttggtcttgaccatcaccaccagcacgtcggaactggtggagtagttgctgatgatgaagttgttgtccttgttgtagcgcgagtccgggcgcagctccggcgcaccctggtcaaggtcgccgatcttcaggttctggctgtaccagaggccgccaccaaaggcgacaagcgccagggcgatggagatcggcgcgactttcgggttggcaaaattcgacagcaggcgccagaacgaatgttcgcgattcgcgtctttcttgctcttggcgatggcacgcttgctgatgccgacataggagatggccaccggcagcaggatcaggttggtgaacacgatcaccgccacgccgatggacgcgccaatcgccagttcgcggatcacaccgatgtcgatgatcaacagcgtgatgaagcccacggcgtcggccaggatggcgatcatccccggcaggaacagttgccggaaggtgcgccgggcggcggtcagggcgttgtccgcctcgctggactgcagcgcgatgccgttgatcttctgcacgccgtgggagatcccgatggcgaagatcaggaacggcaccagcatcgaatacggatcaaggccgaaaccgaagaagtgcatcaaccccagctgccagatcaccgccaccagcgtagtgctcaacacggcgacggtgctgcgcaggcagttggtgaaccacagcagcaggatcagggtgataacgaacgcgatgccgaagaacatcaccaccatgaccaggccgtcgatcaggtcaccgaccttcttggcgaagccgacgatgtggatcttgacgttggggttctgggcttcgaacttatcgcggatcttgtcttccagttcgtgggagaacttgcggtagtccagggccagtaacttgccctggtcctgcgggtccgggtaggactccagcagcggaatgtcgacgatgctcgacttgaaatcgttggccaccaggcgccctacctggccggacttgagcacgttgttgcgcagttgatcgagactttccggcgagccgttgtagctctgcgggatcacttcaccgccggcaaagccttcttcggtcacttcggtccagcgtacgctggggctccacagcgacttgagccccgaacggtcgacgccagagatgtagaacacctcgtcgttgatctgccgcagggtctccatgtactccttggtaaaaatgtcaccgtccttggcctccaccgagatgcgcaccgtgttgcccaggttggccaggtcgttacggtgttccatcatcttttcgatgaaggggtgcttgagggggatcatcttctcgaagctggtggacgggcgaatcaaagtcgcctgccagaacaggaaaatactcaccagcaggcagatgacgatcactgctggccggttgttgaagatcaggcgctcaagaaaggttgctttatcgttgtgatgactgctcattctttccccgcccttattattgttttacgagttcggcgccgttgggcgcggcgacgcgaacgccaccctgccccgccagaatcaagttgccgttgcctgccgccgtgacggacgacagcgaaatccggtccggacggttgaacacgctgaaggtcagaccatcgtcatggctgaccaccacgctgccaccgttgcccaccacgacgatggagccgtcatccagcaaggtcgcgcccgacaaaccaaactccagcgctccccgcgccgcgttcaattcgaccggctcccaggtgctgccaaaatccgtggagcggtacaggttgccacgcaagccataggccagcagcgtctgcggctgggcggtgccgatcacgccgaacagcgagccctcgtaggggccttcgagcttttcccaggtctggccgtcgtcgctggagcggaacatgctgccctgctcgccgacgatgaacaggccggcatccttgatgtgcgcgatggcgttgaggtggtactggtcttcgttgtcaaggcggtcgctgacgtcattccaggtcttgccgccatcggtggtttcgatcaacgcaccgtaggcgcccacggccaggccgtggttcgcgtcgttgaaccacacatcgagtaaaggtgcttcgcgcttgaggtcctggtattgctgggtccaggtggcgccgccgtcggcgctggcgaggatctgcgcatcatggccgaccgcccagccttgcttgtcatcgacaaaaaacaccgccgtgagcaattgccgggtggggactttggcttgggtccaggtgctgccctggtcgtcggaatagaggatgtgcccgcgatcaccgaccgccaccaggcgcttgcccgcgtggaccacgtcgatcatcaggcccttggcggccttgggggattcaatcgcaaacaccggcgttgcggcggtatcgctggcggccagtaccggtgtggacaacgcaccaccgaccagcaacgagagcgctgtggccagcatcgcaaccctgcgtgcggcgcgtgggcggcagacaacccaacccattacaggctcactcatagacctttctcccatttattattgttatcgcttgccttccggggccttgaaacctgcaatctagagcgcctggaggaagcaggggccatcctatcgggctttcgaatcgtctgacaatcggcgctacgttatcttttgttaactgaaggcatttggccccatggtgaatgtagctgcattcgccggggtgatcgccagcgcgcaaatgaatttttattccatctattgaattttaggaatttttattccattaatagccttcctgaaaacaataatccaaaggaccacggcgatgcgtgaactcggaatcggcttgatcggcacaggcttcatgggccgcgcccatgcattggcattcaataacgcccgtgcggtattcgaactgccggtacccctcaagctggccgccctggctgatgccgacagcgaacgcgcccagcgctgcgccaccgcctggggatttgcccaggcccatggcgactggcaggcgctgatcaatgacccgagcgtcgatgtggtagccatcaccacccccaaccatttgcactaccccatggccatggccgcgattgctgcgggcaaagcggtgtactgcgaaaaacccctggccgtcagcctggaacaggcggacgccatgcgcctcgccgccagtgccgccggggtggtgacgcgggtcggctacaactaccagcacaacccgatgatcacgctggcgcggcagatgattgccagcggcgacctcggcgaaatcatcagtttccagggcgagttcagcgaggacttcatggccgacccgacctccccgtggtcatggcgctgtgaggtcgaacatgcggggggcgccctggcggacctgggcagtcatttgttgtcgatggcccgttatctggtgggggatgtgacgagcgtatgtgccgacacccagaccgtccacggccagcgccctgccatcaacggcagcaccgagctgaaatccatcgccgtggatgaccaggtgcatgccctgctgcgtttcgccaacggtgcacgtggcacggtcagcagcagttggctcaagcacggctacaagaaccacctgagtttcgagatcagcggcacgaaaggcaccctggccttcgatcaggaacgcttgaatgaattgcaggtatgccgtattggccaggacggcttccagcgtttgctcgccggccccgccctgccaggttacgcggcgttcagcccggcggcggggcatcagttggggtacaacgaactgaagacgctggaggtgcaggagttgatgctggcgctcgcaggccagggtgcggatggcaccgactttgaggccgcgtgggaagtggagcggttggcgacggcaattcgcgtggcggccaaagaagaacgctgggtacacgtcgaagaagtttaacagccccgaaccttgtggtgagcgagcttgcctcgcgcggggcaagcccgctcactacaaaaagcaaagtctagcgcaaggcccggcgcaggactttgccgacggtggtcttgggcagctcagtagtacggaactccacgtacttgggcaccttgtaccccgtcaggtactcccggcaatgcgccagaatctgctcctgcgtgaggttcgggtccttgcgcaccacgatgatcttcaccttctccccggtcacgccatcttccacgccaatcgccgccacttcacccacgcctgggtgcagcgccaccacatcctcgatttcattggggtacacgttgaaacccgaaaccaggatcatgtctttcttgcggtccaccaggcggatatagccgcgctcgtccatcacaccgatatcgccggtcgatagccacccctcggcatccagcacctcggcggtcgcctccgggcgtttccagtagccctgcatcacctgcggcccgcgcacttgcaactcgccctgctcgccgatatcagccagctcgccgtcttcgcgcatgaagcgcacccaggtcgacggcaagggcacgccgatgctgccggtgaactccatctcacgcatgcgcgcaatgttgatcgggctgatgctcaccaccggcgaacactcggtgaggccgtagccctcgatgatcggcagcccggtgacttccttccaacgcttggccaccgccgtgtgggtggccatgccgccggcgatcaccatgcgcaggtcggaaaagtcccgcgcacagaactccttgttctccagcaagccgttgaacaaggtgttgaccccggcaatgccgttgaaacgctccttgcgcaggatcatctgcacccgtttcacgtcccgtgggttggcgatcaggatgttgcgcccgcccaggcacatgaacatcaggcaattcaccgtcagggaaaagatgtggtacagcggcagcaaggtgacgttggtttcctgcttgtcctggtccagttggtcacccacccacgccttggcttgcaacaggttggcgatgatattgcggtggctgagcatcacgcccttggcgtcgccggtggtgccgccggtgtattgcaaaaaggccaggtcgtccagatgcatccccactgggaaatggttgagtgcccgcccctgtttcagcacctggttgaagcgcaccgaaccgcgcaggttgaacgccggcacctgcttttgcacacggcgcaggatgaagttcatcgccgcgcccttgaaggtgccgagcaggtcaccgatggcggcgatcaccacgcgcttgacgctgctgccggtgatgactttttccagggtgtgggcgaagttctcgaagatcaccacggtttccgcgccgctgtccttgagcagatgcttgagctcatgggcggtgtacagcgggttgacgttgaccaccacggcgccggccaggatcgtgcccagcaggcagatcgggtactgcaagcagttgggcatcatcagcgccacgcgatcgccctgcttgacgccctgtgcctgcagccaggccgcaaaggcgtacccttgcacctgccagtcggcataggtcatttcggtgccgatactgacgtaggccacccgctcgcgaaacttctccaggtgctccaggaatacctcgcgcaacgacggatagtcctcgatacccgcatcgatatccgccgggacgccaggcaggtaagcgttcaaccagatccgttcggtgtgttccaggcttacagcgttcatggcagtctccttgttgttgtttttgatagagctacttttcgacgatggcggtaatgcccagcccgcccgccgcgcagatcgaaatcagcccgcgcccgccaccgttctcatggatgatcttagccagcgccgccaattgccggccaccggtggccgcgaacgggtggccgcaaccgagtgagccaccgttgacgttcattttggcgcggtcgatggcccccagcggtgcctccaggcctaggcgctcgcggcagtaatcggcgtcttcccaggccttgagcgtgcacagcacctgggcggcgaaggcttcgtggatctcgaagaaatcaaagtcattgaagctcaagccttcgcgctggagcatgcgcggcactgcgtaggccggggccatcaacaggccttcgctgccgtcgacgaagttcaccgcggcggtctcgccggtacgcaggtaggccagcaccggccagccgtgttcggcggcccacgcctcgctggccaacaacaccaccgaggcgccatcggtcagtggtgtggaattgcccgccgtgagcgtgccgtcctggcggtcgtaggccggggccagcccggcgagtttctccaggctggcgtcggcgcgcaggttgttgtccttcgccagtccgcgatgggggctgatcaggtcgtcgaagaagccgcgcttgtaggccgcttccaggcgttggtggctggtgagggtcaattcatcctgggccaggcgcttgatctgccagcgcttggccattgcttcgcagtgctcgcccatggacaagccggtgcgtggctcgccattgcgcggcagcaacggcttgaaaaacatcgatgggcgaaccttgagcaacgtcttcaacttggcgcccatgcccttggcgcggttggcggcgagcaaggtgtggcgcagggattcgttgatgccgatgggtgcgtcggaggtggtgtcggaaccgccggcaatgcccacctcgatctggcccagggcgatcttgttcgccaccagcaaggccgcttccaggccggtgccgcaggcttgctgcacgtcgtaggcgggcgtgtccggcgacaaggtggtggagagcagcgactcgcgcgccaggttgaaatcccgcgagtgtttgatcactgccccggcggcaaactcaccgaggcgctggccgtgcagattgtaacggtcgaccaggccctgcaaggcagccaccagcaggtcctggttgctgtcgtgggcgtacaccgtgttggagcgggcaaacgggatgcggttgccgccgataatcgccacgcggcgggtcggcggcgggttgaagctgtagtcactcatcgaacgctctcattccaaatgaataggccgcgcatatggggtttgtcgccggcgaagttgcgcacttcgaattcacggcgcgggccggtcacggggtggttccacagcgctacctggccgggcaggaagatcggcagcttgaagtcgcaatgggcctcggcctggtccagcccgccgggtggttgctgggcggcgagcgctcggcccagggtccacatgccatgggcgatggcacggcgaaagccaaagagtttcgcgccgatcacggaggtgtgaatcgggttgaaatcccccgacaccttggcaaaacgccggcccaggtcggcgggtaacacccagcgctgggtgcacaacaaaccctcctcctgcaatggcaacacgtcgtcccatggctggccgaccgggtccttgacgtcccggcgcaggtacaggctgtcgctctcccagaccagagtgtcggcaccgtaggcacgggtggcgatgctcagcgcctggcctttgggatgggcgacccaacgctcggcatacacctccaggcgcaaggcctggcccgggtgcaggcgctggtgctggcgaatgcgattggccaggtgcaccatgccgctggccgggtacgggaagcttgggcgcgtcagcagcatcaggtgcagcgggaacgccagcacatggggataggacaacggcacgccctgctcacggcgaaacccacaggcacggccataggcctcaatgccggcgcccgacaactcggctgccgcacgcaccagacgctctttgggcagcagcggcgcaccgtcgagcgtgggtttgcgcaaggcgcgcacgccatccagcagcaagcgcgtgcgcgatggcggcgggtcgataatctgcgtcacgtagtccatggctcaggcccccagcaggctttgcccgcacacgcgtacaacctggccgttgaccccgccggacgccgggtgtgccagccaggcgatggtctcggccacgtcaatcggctgcccgccctgggacatcgagttcatgcgccgccccgcttcgcggatcatcagcgggattttcgcggtcatctgggtctcgataaacccgggcgccaccgcattcacggtgacctgctgcgccgctgcatggggtgccagcccttgcaccaggccaatcacaccggccttggaggtggcgtaattgctctggccgaggttgccggcgatgccggagatcgacgacacgcacacgatgcgcccaccgggattgagcccctggttgccgagcaacgcctgactgagttgcaacggtgcttcgaggttgaccgccagcacgctgcgccacgctgcttcgggcattttcgcgatggttttgtcacgggtgatcccggcgttgtgcaccaccacatcaaacgcgccgtattgactggtgtgggcctgcaacaacgcggcggcatccggggcggtgatgtccagcggcaacgcggacccgccaacgctggtagcggcttgctgcaaggcttcttgcgcctggggcacgtccacgcacaccacatgcgcaccgtctcgggcaagcacctgggcaatcgccaggccaatgccacgggaggcaccggtgaccagggcgcggcggccggcgaagggtttgtcccagttgacggtgacgtggccgtctaccggttgttccaggcgcaccacttgcccggacacataggccgagcggcgcgacaggaagaaacgcaagctgctgtccagtgcttcttcggcacccggcgccacgtagatcaattgcacggtgatcgcccggcgcagctctttggccaacgagcgcaccagcccttcaagggcgcgctgggcgatggcctggggcaagtcctggcaatgttccggcgcagtgccgagcaccaccacacggccatggtggccgatgcgtttggcgttggcgtggaagaattcatacagctcgtccagctgttgcagatcggccacggcgctggcgtcaaacactgcgccctgcaccttgaccgtggacggcgccttgggcgtggccggggtggcgatcactgtgtcggtggccgcgaacacacgctgcacttcagcggccagacgccctgccccggcaacgatcaccggattgaccaggccatgctggccgctgcgatggcgttgcagcggcagcggttgcggtaaacccacggcctgggccaggcgacggccccagggggaattgacgaacgaaaggtagctgtcactcatagatagatccactcaccacacatacttgccgtgtaaacccggtctgtgtgggagggggcttgcccccgatagcactctatcagtcaacgattcattggctgaaccaccgctatcgggggcaagccccctcccacattgattgggttttttcctaattgactgaggcgttttcactttggctggcgcgacgtttcgtggtcggctccagcgcctgtttgcgctgttgcaatgcttccaacaagccgaagtcctgcggaaagtcgtccacctggataccgtgatcggcgtattccacataacgcccgagcaaggtgtcttcgtcgtcgctgatcaggtccagtgcccgtgccttgacgcgccaggtcgtgaacgccgtggcggagatcggcattggctcgatcaggccctgcttgacggcggacttgagtcgggcctcgatcagctccacttgcggcaacagacggaaacccagttcgccataggccagcttgtcgatttccggacgtgggatgtaggaattggccagcagacggtcgcgggtttcccccggcgtctgcaccacatcggccacctgggccagcaggcggtcggacggcttgcgcaatgggataccgaaggggaacgtcaatgcctttagcacggatgcagcggctttcgacgggtaattgtcgagcacttcggccaacgcttcatgggcacgcagcaacgcatcctgggccgcccagtgcaccagcggcaaatccgcctggggccggccgtcatcctcaaagcgcttgagcacgcaggacaggatgtacagctgcgacagaatatcccccaggcgcccggtgatactttccttgcgcttgagggcaccgcccagcacgcccatggagatatccgagaccaacgccagcaccaccgacagacgattggcctggcggtagtaggacgccagcgcggggtcggtcttggccggcgcagaaatcagccgaccgcctgtcagggaatgcaccactgcgcgtacggtgttggccaatacaaagctcacatggccgaacatggcactgtcgaatgcctccagcgccttgcgccggtccgggttgcgcgccgcttccatctcgcggaacacatagggatggcaacggatcaggccctggccaaagataatcaggcagcgcgtcatgatgttcgcgccttccaccgtaatggcgatggggctttgctgataggcgcgggccaggaagttgttcggccccatgcagatgcctttgccggcgacgatgtccatgccgtcattgacgatgatccgcgcccgttcggtaacgtggtacttggcaatggccgagatcaccgaaggtttctctcccgcatccagggacgctaccgacaccttgcgcaccgcatcgcaggcatacaggtgcccggccatccgcgccaggggcgcttgcacgccttcgaacttgccgatgggcaggccgaattgtttacgcatcgccgcatacgcggtcgtgccgcgcaccgcgaccttgcccaggccgacgttggccgatggcagcgaaatcgcccgtccggctgccaggcattccatcaacatgcgccagccgttgccgacttgttcgcgcccgccgatcacccattccaaggggatgaacacgtccttgccggtggtaggaccgttctggaacacggcgttgagtggccaatgccggcggccgctgttgacgcctgggtgagacgttggaatcagtgcgcaggtgatgccaagggaacccggagcgccgagcaggccgtccggatcttctgcgcgaaacgccaggccgagcaccgtggcgatcgggccgagggtgatgtagcgcttgtcccaggtcacccggaagccgagcacttcctcgccttcatgcatccctttgcaaacgatgcccaggtcgggaatcgccccggcatcggagccggcatacgggctggtcagggcaaagcacgggatgtcttccccccgcgccaggcgcggcaggtagtaattgcgctgggcatcggtgccatagtgcagcagcagttcggccgggcccaaggagttgggcaccatcaccgaaatcgccgccgccgagcagcgcgtcgacagcttcatcaccacctgcgaatgcgcatagtgggagaagcctttgccaccgtactgcttgggaatgatcatgccgaggaacccggcgtccttggtgtattgccagccttcaggagacatgtcctgccacacctgagtggtttcccaatcgttggcgatgtcgcacagggtctccacttcgttgtcgaggaaggcctgctcttcggcgctcaggctggcgggcgcggcttgcagcaggcgctgccaatcgggcttgccgctgaacagctcggcgtcccaccacacggtgccggactcgatcgcggcgcgctcggtgtcggacatagcgggcatgattgtacgaaacaaacccagagccttgctggtgagcaaggtgcggcgcaggggtttgatggtcatcagcactgcgggcaacaccaccagcagcgccgcaacgccaatgccgaaaccggccacagcgttgaacaggtaaccggccgccagccagatcaagccagcgcccagccagtgaatggcagcggcttgtcgatacgccagggcaatcgcagcggcgacacccaccaataaccagataaacatggggatacctctactcgattcagggtatggcaaaagcgcttgcaggtcgcactgacctcaggcgtaaggccacactacaaactcggagaaaaacattcaatttttgttttgaaatttttatttaatgcttggacgaataaacaacggctgaacaggtcagccttacagagtcgcgattgagttgaagcggtacgggtcgcctgcgcgacccatcaacgccaggccagactcaaacggcacgggagatgcgctccctgccgctcgtctatgggccctgcgctcacaatgaatcagaacgcgtaagtcgccgaaaggctgacaacttcacccttcgcgtcggctttgccatcgagagtggccccacccaaacgatcctggttgtgggtcctcagcttggctttctcgacgaattgccgcgagtaagccccatcgatactcaaaccaggaatagcacggatgttgtagccaaacccgagggaagcaaatatacgatcaccgtccggaatacgtgggtcacgtgtggagtttcgtgttggggtctggtcggtggctacaccggcacggaaagtgaagtcgtcggtgaatttatagtcaccgcccagcgaaaccatccaagcgtttttataattgtagggaattgacacaatttgcgcgccgtcagacttcaatgtcagtgccttgaacgacgaccattgagtccaggtaacgctggcgcccaacgtcagacggtcattgaactgatgcacccaatcgacagaggcatttgccggcacatccagttgcgcggaggcattggcgccattggagttgaggttgagccccggatacgcgagtgcaggcaggccaccatcgatcagcgctttgttcgcgtcgtcggcgtaaatgctgtacttaccctctagcttgttttttatcttggcgtggtagttcaaacccagggtgtcgaattcggttggcttccagaccacaccggcaaaccagccaacggaggtgttatccaccttgacccgcatcaaagaagaacccacaccggaagggaacggaattccgatggcaggtgacaacgccgctgctgcatataagtcgatgttctggctgacaaaccctttggtgtgctgaacaattgcaccggcgcccaaagagaactggtcattaaccttgaacgataacgaacccgtgactccgacggtttcaatacgcgtatcgaccgcaaaatcccggccgatccagtcctggtcccaggttgtacgtgcacccatcggcactacctggcttaaaccgaaagcaaaacggtcgttgataggcatcaccatgaagccggtgggcaaccacgcggtaaagccgccttgtccaccatcaccggtgcgtggcgtggagcttaaatcagtggggtctacggcggctggcgcattgcctgcgtaatccttggccgtccccttgtatttgatattaatccgtgcgtaatcgacggtgaactgagaaacgttgtgatcgatgaaagccatggccgccgggttgttgtaagccgcagacgggtcattctggaacaacgatccccccccgaaggctctcccccagccaggagcaccgaaagtcggcgtggaaaacccgccagcctgcgcctgaccggttgcagtcatgaggctgcctagaatcgccagactcaataatgtgcgcgcctgttgttttttattgttcatgccctgttccttattatttttctcatgttcggcgttcaaacctgtcccacgtcagcgggcgccttttgcaaggcgcccgccttaacgtgtgatcatcacgtttacagccagaagcacgttatcaaggggtcacagtgaaggccgggcttggattgacagccagggttttgatgctgcaggcacccacagtttgtgcagccggaatactcagcgtattggtcgcgttgttccaagtgacggcgatgtttgcagtgccacagttcgaaacaatcttgaagctcacaccttccacaaccccagtgaagttgttggtgctacccgccacgggcacgatgtttttcagcgtccaaggcaagttctgcataaccggtacaccacacaacgcgttagagccgctgacgctcgcaccagtgatggcagcagtggtgccatcagccgctaccgtaccggtaaacgtgatgttgcaaggcacggcaattcccagcgaagcaggtgaagccaccgaaatcggaccgcttgcagtgaagccgccagtcggcgcgatagtggccgcgctggccattgaagcggcaccaacgcagagggcgaacgaagttgcacaaacgagggttttcaagcttttcattgtttttcctcacatgttaaggcgaagtcatttcgccaggggtaatggccatgatcgagaggtcacggtgaaactgcagaacttccctttccagccaaatctcaattcaattaccgctgcaacatccgacggttattcaacaactttgaagttcggcggcatcttgatcgacaccgtcttgatcttgcagtcttcgccaatcggcacattggcggcttccaacttgccggtggcgttatcccaagtgccatcggccgttgaaggtccgcactttccgcccaggccaaatgcatgcacatccacgctgatcttcgacatggaaccgctcttggtgtctttggcgactaacacccatggcaagttgatggcttccacgcggctgcacttgaggccgccgtcgaattcaactttgtcgacattcaccgaggagccatcggccgcaactttgccggccactttgatggtgcagtcggcgctgatcagcgcgcccttggagaagctgatggggccttgggcggtaaaggcgctgcccgccggttcgatgcgcgcagcctgggcctggtgatacgcgatcaggcccagcgcggccaatacgatgtgggtggtgaacttggcaggtgattgcatggtgtacgtccttccctttaattatttttgttcgggtcaaaccactgtgttgcaactgattttgtaaaccttgggcgaagttagcctgcgcggcacgcaggccccgagtacgccaacaaccggttagttgaacttaaaacggtttggcgctgttactgtacttctccaggtacttcaaccgttgtgagggctgaagattggtcagggagatatccccggcataatgattcagcacgcgatggtccatgcgccgccgccacaagtacggcacataggcccagacaatcatgctcgcgtagccatagggcagttgcggtgattcatcaaagtggcgcaacgactgataactacgggtcgggttggcatggtgatcagagtgccgttgaagttggaacagaaagatattggtaacaatacggttgctgttccatgaatgccgtggcgagcaacgttcataacgaccattgggcaacttctggcgtttaaggccgtagtgctccacatagttcacgacttccagcaacgagaagccgtagatgccctggataatcaggaacggaatcactgccgcgcccagccaggcgatcatcgcgccccacagcaccacgctgtacatccaggcgctgagcacaccgttctgccagtgccaggccggcaaaccgagtttgcgcaggcgttcgcgctccaggttccacgccgagcgtgcactgaaccacaccgagcgtggcaggaacgcccagaagctctcgcccaaccgcgaactggcggggtcttccggcgtcgcgacacgcacgtgatggccacggttgtgttcggtgtagaagtgcccgtagaaagtcggtgccagggtgaccttggccaggaacacttccagcgcgttgggcttgtgccccagctcatgcgccgtgttgatcgcgatgccggtggcggcgccggtcgacatggccatgcccaggtaagtgaaccagctcggttcgccatgcagttgcgtgcgtgcagtgatgtaactcgcagcgtgagacagccagctggacggctccaggttcgcggcagcctgcaacaggccgccctggatgatccagtcgataccgcccgcggcgagccagccggtgatcaccaccgacgagatcacaaacagcacgccggtgtagacgatccagcgatagtagctttgggattcgaggtggctgacggcggattcgggcgggttgctcacgtcttcaccgagcaagccatcgatcaacgggatcagaccgaagatcaccagtacaccgacccaccagagttgctggataccggtgctgatggccagtgcgccggagagcaacggggtggccaggggcatgatgcccagccaccacaggtgacgtttgccgtcggtccagatgcttggggctgccagggtctgattcatggcagcctccgtggcagggaggcaggaaacaggttcagggagcgctgaaggctccaggaaatcaaccatgcgataaaagacgtttttttcatttttattcgctcttaggcatttcaaaaatcatttcaaaataaacattgaaatatttttttaaagaaatagcgcggaatcgttaggtcgtcaactactttttcgaggccttttttgcgtgaccgtgcagtctctttttcagctgtttggtcaggtctctagggcaagcatttcggacagtcaaacccgcaacgagggccacgattatttgttcgccaaggcaaatggcggatgcaggatcgcggcggtctgtgctggccgcgcccgcttggccaactgctggactgcctcgaccacccgttcggtggcggtgatcggcagcatatgcccgcgcccttccactacttgcagcttcaggcccggcaccttgtcggccagggcctggccgtgcttgcgaaagtccaggaccttgtcccgtgcgccgtagatcaggctgatgggcagcgtcagttgcgggtagcgcttgaccatgtccggcaggtcgtcgttgaccagagcgatctcgctggaggctgcatagaagttgtcaggacgcatgcccagcagcccgccgccacgggtggcgaagtcgtccggggcactgtccggtgcgaacacgcccttgaccaccgagcggcgcgtcaacaggcccatgggaaccgtcaaggtgcgcgacacccagcgcctgagccaggcaggtcgcacagccagtgaccagaacaccagtggcaaggtcggttgagggtgcgtcaggggcgccaccagtatcagcccggacaccgcatggggatggtcgagggccagcgccagggaaatcgccccaccaagggaatgccccagcaccagcggtttatccaggcccagcgtattgataaacgccgccacctgccgtgcctgggctggcaagtccgcaggagtgcctttatgacgggtggaatagcccgaccctggtcggtcgaggctgatcacgcgaaaatgctcgcgcaactggccggacaaggcatacgtcaggttgcgactgctgcccatcagcccgtgaatcatcaccagcggcgggcctttgccttcctcgtaataatgaaagcgctcgccgtccacctccagaaagcgcccgttgatcggaacggcggcttcgatacgccgcgtcatccatgtactgaacccccacaaaacggcgctcgcgcctataaacacagccgcagcgacaacccattcaacagccatagctcggtcctctgcatccctgctgccggcgacctgaccggaattgatcaaggcctcggccatcgtccacaccctggacccgaactgcgtgcctgtccgtcggacaagtggcacatgagagacctgggactagcgtaggcgatattttcaggtagattatttaaaatcttttttaaaataagtaattcaatttttctttgcaatggtgttctatctaaaagacaaaacaagaaaggagcacatccgatgcccacgagggactgcttatgaatgcccagagtgattcaatcgacatcgccatcatcggctccggcttcgccggcctgtgcatggcgatcaagctcaaggaggccgggttcaccgacttctttattgccgaacaggccgacaccctcggcggcacctggcgggacaaccactacccgggctgcgcctgcgatgtgcagtcccatgtgtattcgttttcctttgcacccaacccggcctggacacggcagttcgcgccgcaggcggagatccgtgcgtacctggagcaatgcgccacgcgctttgggttggggccttacctgcgtttcggcatgggcttgcagcgcgcggtgttcgatgagcacctgcaacgctggcaattgaacttcagcgatggccgccaggtcagcgcgcgggtgctggtgtcaggcatgggcggcctgtcgcgcccggcgttaccggatattccgggtctggacagcttcaagggcaagcgcttccactcccagcagtgggaccacgactattccttgaaaggcaaacgcgtagcggtgatcggcaccggcgccagtgccattcagttcgtgccgcagatcgcgccgcaagtggcccatatggacctgtttcagcgcacgccaccgtggatcatgcccaagcccgaccgggcgattacgcctttggagcgctggctgttcaagcacctgcccttcactcagcgcctggtgcgcggtgctttttactgggcgctggaaggccgtgtagtgggctttgccctgcacccacggctgatgaaaatggtgcagaaaatcgccctgcgtcacctgcacaaacaagtggcgcgcccgtctctgcgcaagaccctgaccccggactacaccatcggctgcaagcgcgtactgatttccaacgactactaccccgccttgtcgcgcagcaatgtcgaggtggtcaccgatcacgtgctgcgcatcgaagccgacggtgtgatcaccgccgacggcatcaagcacccggccgattgcctgatcttcggcaccggtttccaggccaccgatcccctgccccgcgactgcatcatcgggcgtggcggtgtggacctgatggacacctggaaagacggcgcccatgcctacaagggcaccacggtgcctggctatcccaacctgttcctgatcgtcggccccaacaccggcctggggcataactcgatgatcctgatgatcgaagcccaggtgacctacatcctcgatgcgctccagcacatgcagcggcagcgcatcgctacggtggacgtcaaagcggccgtggaaagcgcctacaaccaacagctgcaagccaagctcaagcgcaccatctggaataccggtgggtgccagagctggtacctcgacccgcgcaccggcaagaacaccaccctgtggcctggctcgacctggcgcttcaagcaggtcacccgccagtttgcgctgaaggattacgtggccgacctgctgccggtgaacacgcccagccgccccgtgccggcaccccactccaccccggaaggcagtctgtcatgaagtcattcaatggccgcgtagcggcaattaccggcgccgcatccggcatgggccgcgccctggcattggccctggcgcgtgaaggttgccacctggcgctggcggataaaaacagccagggactggaacagaccctggcgctgatcaagacctcgaccctggccccggtgtcggtcactacccaggtgctggacgtgtccgatcgccaggccatggaggactgggccgcacgctgcgcggccgatcacggccaggtcaacctggtgttcaacaatgccggggtggccctgtcaagcacggtggagggcgtggactatgccgacctggaatggatcgtcggtatcaatttttggggcgtggtgcatggcaccaaagcattcctgccgcacctgaaagcctcgggcgacggccatgtgatcaacacgtccagcgtattcggcctgttcgcccagcccggcatgagcggctacaacgccaccaagtttgcggtgcgcggctttaccgaatccctgcgccaggaactggacctgcaacgctgcggcgtgtcagccacctgcgtgcaccccggtggcatccgcaccgacatctgccgcagcagccgtatcgacgcgaacatgacgggtttcctgatccacagcgaacagcaggcccgcgctgacttcgaaaagctgttcatcaccgatgccgaccaggccgccaaggtaatcctgcgtggcgtgcgcaacaacaagcgccgcgtgctcatcggccgcgacgcgtattgcctcgacctgctcgcccgttgcctgccggccgcctatcaggccctggtggtgttcgccagcaagcgcatggcgcccaagccgcgtacgccggtatttgaaaccaatgacgaaccccgtctctgaacaggagcacgcactatgttgccgatccgccgtgacatccatttcgccctgcccgccgagcgcatcaaggactggcatgaacagggcccgttcatcacgcatttcttcaatgccctgtcgctgctgtttccccagggcgagctgtttttcatggacagcgtgcgccactaccgccagcacatcgacgaccctgctcttaaaaaagagatccagggtttcatcggccaggaggccatgcacagccgtgaacacgtggcctacaacgacttgctgcaagccgccgggctgcctgcgcatacactcgaccggcgcctcaaattcatcctcgacctgcagaaaaagcacctgccaccgtccttcaacctggcggtcaccattgcccttgagcactacacggcgatgctggctgaaatcctgttgagcgacccttcacgcttcggcaattcactcaagggctatcagcagatgtggtattggcacgccctggaagaaaccgagcacaaggccgtggccttcgatgtgtggaaccgcgtgatcaaacccggccccaagcgctacctgttgcgcaccggcaccatgctcaccactacggtgttcttctggctggtggtgttcgactttcacctgcgcttgctgattgccgaccgcaagtcgggtgggcacctgaggggtttctggcgcatgttgaagtttttgtatgggcacaaaggtgttttcccacgaatgctggtgccgtggctgcactacttcaaacccggttttcacccctgggaccacgacaatcgggcgcgcctggccgggatcgatggcctggtcgaggagatcgagcaggcccagcgcgggtattaagcctgcgccaaggcggcgcgttcacgtacaaacccttgcaactgatcgcccggcagcgccttgctgaaataccagccctggataatcaattcggcgccggtattcaggaaggccaactgctcggcagtctcgacgccttccaccaccacgcccaggttcagcgcctcacagaagcgcagcatgccggtcatcacctgggcgcccttggggtcgtgctgggccaccacgaagctgcggtcgatcttgatgaagtccaccgggaactggtgcaggtaactcagggccgagaagccagtgccgaagtcgtcgatatacaccttggcaccgatagcctgcagcttctggatggtctggcgcgtgacctggatatcactgaccagcgcgtcttcggtgatctctaccgatacgtgcccatgggcctgggccaggatctccaccaggcgttcgccataggcggcgtcggtcagggtcgcgctggaaatattgatggtcatcggcagggcaaaaccgagtttctgccacttctggtactggcgaactgcctgggacgccacccacacatccacatccggcatcaaccgtgcctgggccagccattgcaggaattcccacggcgaatgcaccgtgccctgggcgtcgcgggcacgcatcagcgcttcacacccggtgcacaggccggtacgggtcgagacctgcggttggaattcgaggtagaactcatagtcgctgatctgctggatgcggctcagctccaaggcctggcgcgccagggtcttgtgggaggcgagtaccgggtccagctcgcgcaggcggcccttttcttcaaggccacggaaggtcatgtccagggacttgaggtacaccgtgcccccttcgctggcctggcgatggatcgcccgcacatacggcgcgtacaccagagtgcccaggcccagcagcgccacttgcagtgccaccgcagccaggtcgccgtgggtactcagataggcattgagcagcaccggcgcggtgaacggcacactgaccaccgccggcgacacccagcccatctgtaccaccgtcaatgccagcatggcattcaacgccgggacgatcagaaacggtatgaacaaacgcgggttgaggatgatcggcaagccgaacagcagcacctcactgacgttgaacagtgacagcggcagactcgccaccgccaacaggcgcatggactggctcttggagaacagcaggatggccagcaacaggcacaatgcaccgcccgagccaccgataaacgcaaagctgcccaacaggccactgttcaacacatatttgagcggctcacccgccgcctgggccgtgctgttcagcaccacggcctggtccagcacatcgaacagcggttgcatcgcgtacacaccgtgtatgccgaaaaaccacagcagcgaattcatcagcgtcacgaacagaccgctgccgtagggcgattccagcgcgtcgaggacctgggggccttgtaactgcgccacatacggaatctgcagcaacaaggacagcaccaccaccagtgccagggcggtgatagcgcctggcagcaccatattaatggtgccccgcaggttgtgccccaccaggtcttcgttgaccagacgggtccagcggtagcggtgcagccaggcaatggcaggaacattcaacagtggcgaggcaatggcgataaacagcacaaaggtggccgaggcccggggataatcgcgcagaataaatgttgccaccaccacatgggccaggcacaggaatgccacgggcaattgcggcaggcgatgctggatcgccagcatgtaaccgatggacgcggccaccagcaacgggatcacggaactgatctggttgtgcaggccggcgaggaacgccaccacctgggggtcaaagccaaggacgcgagcacattccgacagaatcagaaagcccgccgagaccagcaggcaaggcaggatccacaacaacccttcgcggatcgcccgcagcgattcagtgctggccaacgcggccaggcgttgggtgaagaaaagcttgaacagcgtttgcgccatgacccatccctctgcccatcgcccactgtccctgcagggcagggctggaagcaccggctaacgctacacgtcctggcccaatcagcgaaagccttttgccattcatctgggtgaattttccgtatcggataacaggccaatcgccgaatctgcttcaatgaagcctatccgcctccccctgacctgtgtttggagtaagcctttgtcacaacccggtgataaccaccagcgcgcgctggacaaattccttgaagaacaccccgaagtcgccgccgaactggataccctgaatccgctggctgcgcaggccaggggcgaaaccctggtccagtaccgcgccgaacgcttgcatgaagcctttgaagcgcaagctgaacgccagggcctgtttgcctgggagctaaccctcaaactgaccgccgactcctgcgaggcctttgaagcccagcgcctcgaagtgcacaaggaggtggcgcagatggctggcctgagctgggtcgagtactgccaactgcacgacctgccccgctaacgcactaccccaggaaccagagacggcgcctgccccccagcacttcgcgcaactcggcgaccgacaccgttcgttgttcaggatccatcgccagtgccgaacacacagcgggccagcaatgcctgggcagttgcctcggcctcggcagcggctgatgctgctgacgttcgccggggcgcctcccttcggccagttcatagagcacgctggcaaccccgtataaatccgcacgggctgacggaagcccgccggccatcagctccggtgccgcatacgcaggggtccaggcattcaggcgactgcggctcaagccgggcaatcctgcccttgcctgcgcttcagcatggcccaggccaaaatcgaacaagcgtaccccctgctcccccaccatgatgttcgccggtttcacatcgccatgcaggaccccttgtcgatgggtgtacgccagtgcatccagaagttgcacggcgatgggttgcaacgctggccacgccaacccttgcgggcattccgggagcaggcggtccagggtcaggccgggcatcacttccatggtgaagaatgccaactggtgcgctgtgtcgacctcgaaagaaaaggcccggaccacgtgttcatggcgcaggcttcgggtcagggcgaactcgctgtacagcaacacgtgggcgtcggtggacgcacagagcgtctctcccaacagcttcagcgccacgcgcgcgtccggttcgccaaacgcctcatgtagcagatcccgggcacgatagaccacccccatgccccctgaaccgagcattcgctccagctggtagcgccccgcaagcaggttcggcgggccgacagcggcgttcatggctgcaccaccaccgcagtgaggtcatcctgtgcgggcccacgtagcacgtcgctgaacaaccgctccaccacctgccctggcgtgccggcattcatcgcgcgccccagttcccggtggctgagcccttggtacaggccatcactgcacagcaagaacacatcgcctgggtggggacgcagttccagtatctccagactcagcggttttcccgcgccaatggcacgagtcaaggcgcgggcgtctggatgagcgcgggccagttccaggctcaaatgctgcttgtccatcagttgctgttgcagggagtggtccctggacagctgatacaaacgctgccctcgccagagataacatcggctgtcccctgcccagatgcacgccgcgcggtcacgctcaagcaacagcacaaccaccgtactgcccatgatgcctgaggggccatcggccgcctgcaactggctgtcgagcccgcgcaggcagcgttggacggcctcgacccgttggtcgaagctgccttgccctggcagcgccgccagactgctgattaccctttgactggccacattcccagcatgatgcccacccattccatcggcgaccgcccagcaaccgcgttgcgggcaatcgaggaacccatcctcgttacgcgcacgacgcttgccttgcgccgtacggccggcacttcgccaagggtgcgcgcggttcacaattgctccggcaggcgaaagccgcgccatgtagccatctggaacgggctggggctgcgttggctggtgagcaggtagttggcacgcaggccggccaggtcggccttgagtatctgtgcatccctgccgctggccggctcgttttgcatcaattcgaaaagccggaacaacgaccaggccccctggtctttttcaatgcccagcggtcgctccgtaccgcgctccagtaccaggctgctgcgcccattgtccgcatcaatcggccaatggaacgccatcggcacgatggggccgtgacggtattccaattgctgatcgcccacccgcagcgtcgcccggttgacggcctggtccaggctgtagggcgccagcgtgaacagaacggtccaatccccctggtctgcgctgaagaacccttggcgaatcacctgcgcccgggtcagttggtcgagcaacgagcgtgaaacaggcaggctgcggccctcaaggccccgcaaacgatagcggctcccctcgacactgacgaacggccgcaggtagctgtcatagaagtgctccatcaccccccgtggtttaaagaacgactggaaatcacccagggcaacatcgctgccggcatcggcattgaaggggtagcggtgccggatcgccttcacataaaaaccatacacctcactgtgataacgctggttcacatacccataggcgtcatccagcagatggcgccaggtttgctcggcaatcccgtccaaccagcccttgagcggctgcggcaggcgagcagcagcgtcacgcaggttgcccagcagcggctgctgtccatccatgcgttgcctggccatcttgaatgcggcctgctcgggcgaactgtcacggttcagtgtcgagacttgcaggtgcagctcatccagcaagcgcaaggcctgggtcagctcggcggtcgggttctgctcttcatccagcaataggtgcaaaggctcgaaacgacgcagtaaagcgcgccgggcagtatccggcagcgtttggcgcggcaaggctcgggtgagcaagccggacaccggcgcgcccaactcagcgacctgctggctcaccgcttcaagccgctcatgggtcggcagcaatcgcgtgtgttcacgcacctgccgcaacagcaacaccagcgccgactgggcggaagtgaagttcgcgagctgctgcgcatcgtgcctcaggtcgtcgctttccagtagcctgactcgacccagcgcatcactccagatgtcggcgtactcgctgaagtaacgctgttccagctccagcatcagcttgcgcaagtccacgacgctgaggtctgcggcctcgccaagcacccagttatcctgggcgatggcattgaccaactgtggcccctggctttcgaaaaactgcaggtatttacgcgtatagaaacccgggatgggcggctcaaccctggaaaacgcggggttttcagcgaggcgcaagggttccaggtgccgcgcttgctcgcgcagtgtccggtagaccacctctgccattggctcaccgcgcagcaccaggcgggcatgggcgaccaactcatcattcagcggggccaaaaaaccctgttcaacgagccgtgcaacatgttcgttcaggcgtttgtgtgtcgatgcatcctcgatgtacccaacagtccgcagccccgccacttgctcggccaaccaggccttatcacgtcgctcgggcagattgagcatcaggtaagcgcgcaggctgtcgagcaactgctcgcgatcacccaggctgtcacgtacctgttgttcgagccgtagggtcacgtagggcagcaattgctgatgcagggcttgttcgtaggcgctgctcaataacggccgactcatctcgccctgatacaagccgccccgctcaacccaaggtactttggccgccggtggaaacacccctgtggccgccaggcgactgtccaacagtgcgagcaacgccaggctggcgtccgcttcgggttggcctacggacttggggttgatcagctcccgcagttgcaccagccgctgatggttgaacgcgtaactgtgcgcccacagcgccccggcagcacccacaaccaatgaggcggccagcgccatcaacccgtggcgtcgacggatgcgctgccgctccggggcacgcaacccggcaagaccggcctcggcaaaaatcacccgattgaacaggccctgggcaaaatgggcacgcacatcatctgtcttcgcgcaggtcaggtagaacccgcgcaagccgttgattcgctggtagcgatgggcggcaaacgcactctcgataaacaggcagacaaactcgcccaggcgcgcaagatgctgaggaaaacccagcatgcggcctcggcgctcaaggttgcgttcctgatgcaagcgcgggatcagctcggccgccacgcgttgcaacaaggcgtcgaatgtttcgcgtacctcggcgacttccatgcctgccgcagccgccaccaggcgctcacccagccagtcttctgtggcgtcgccctgccgcgcatcaaagaactcggcaaacccggccaaccgatcaagctgggtcagcaccagatacaccggcacatccacctgcagtgactgctgaatgtcctgcaagcggttacgcacatggcgcgcgtgacgctccaggtcgtgttcgttgctgcgcaacagcgtaccgacggacagcgtcaccaccacgccatcgagcggccgtgccctgcgccatgacttgagcatgtccagcattgtcgaccatcctgctgcatcgacactttggtcgggttggctcaggtatcgacctgccatctcgaccaccaccgcatcgtctgcaaaataccagtcacagtacgaggtggcgcctggctgcatcgggtgcgtccggtcgagcgccgtcggcaacccggcagcggccagcaagtcggtcttgccgctgccctgctcgccgatcaacaggtaccagggcaattcctggcgcgaacgctcactgcgctcgccgtagcgctgcgcggttttcaacgtctgcagcgcttccttgaagcgcccccgcacctgcgccacttcgtcattgatcaacccctgctgctgaagatgttcacgctgcccaggctgatccaaacgcgcggagcgacgtgctcccaccaccaccatcgccaatccccataacagcagcattgcgctgatggtcaacaaccgggccgtcgaaccctgccagaaacggtagtcgtctaccgccagcaacggcccgacgaaccacaccagcagcgcgccggccagcaccagcaacaggctccatgcccaactctcgcgcagcaccctgcccacgcgtttgaagaatgcgttcattcattgctcccagcgttacaagggcgtccgagacggctctgccagcgaagattggaaagcatgcaacgtcgccctgcgctcctgccccagcatccaggcgaaccccgaatacaccaccagcagacacgccagcacgcagactgcggcccaggcagcagagacaatgcgtatccgtgcccgagcggtcccgtcggcgtctgctacaggggttaacggcggctgatcgccgcgcacatgcctgatctggcgatacaccgcgtcgtgtacggtttcgagctgcgccctcccccgctccatgacgcggtattggccttcgaaccccaaggacaggcacaggtacatcaactccagcagggccacatgcttgacggggtcgcgggacaagcgctcgagcagttggaaaaacttttcaccgccaaaggtttcgttatggaagcggctaagcaggctggtcttcgaccagtcgctacggccaccccacggcgtagtgaccacggcttcatcaatgacactgcacagcacgtaacgcgccgacatcacctggctgttctcggcgcccagatacaaggcataggcctcgaacgcattgatgcctgaggaaaactgctcattgagtgcctgctggctttcgcgaccggggttggccttgagctggaccacttgcagcaagagttcccaagccgcggtcaacagcacattggggccactcttgaagtgccgtgtaccttgcagctgggcgcaatagatcatgcggtcttccagttgctcgaagcgtggcggcgacggaaagtccgtaacggctgcgtgcgccgggccgagaccctcacggtcaagcaacacggttttttcgtcttgcgggtattcactgtccatagtcatgacgtcagttcctgatagcccagaagttgagttccagctcggcaaactcgccgctggcgtggaaggcgaaaccacctgattgctccagctgtgcaatgtcacgggggctgagttcgagcatgaaataggtcttgccggcgtggaacggaatctgccgcggcgctaccggcaacggcttgaccttgatcccggccaggtgcaggttgaccagttcgcggatgcgctccaccggtccgatcttgagatgggccggcagtcgatgacgcagctcctcggtatcgcactgggcagtggccgccaggatgaaggtggccgtaccgagtaacttgaggtcgctcaccgggcagaccagcaccccgtactgacggggttgcagcgtcaactcgaccgcctgctgttccaacaccagcgacagcaccgtacgaaggccttccatcaacccgcgaaagctcgcgccctgatcgccatgccggtattgcaccggaaattgcgcacgtttgttgtcgttggaaaacgtgcacagctcaccgaaaatcgacagcaactcccgatacaccacctccgggcgcacctgggtctggctcaggtagtgacgcaatctcaactccgcacgattgatcaactgcagcatcaaaaagtcgccgacctgtgcgctggcggaagcgccgtttccctggatgcgagctgcaatcgcatcgccacgggtcgccagcaggctggtgatttcgttgatgcaagacgccacataccccgagccctggaggtagataaacgtcggtacaaaatccgcatccagcctcacaccaccgtcctgggtcgaatccaccacccgggcaacctggagtttcacgtagaaagggtcaccgggcggctcgcccagcatcaggcgcaagtccgggcgcgcgcatttgatctggcaacgggagtcgaccccggcagcggagtcaccgatctctgcatcacaggcgacatagcgcgccaggacatcgctttgctccttcgagcgcacctcgatctgattgtcagtcaccagcggcagcgccaggtacacagcctgcctgcctggattggcaggcacctgcaacatcaggggttccagggtgccgctcagctcgaacaggctgccgtccggtaacactccgctggcctggttcaccacaatcttgcccaggttgaggtactgcacatcgacttccaggctcaggaaaccccaggcatcactgttcaacagccgggtatggttgagttgccgatggtagtagcggtcgctgtgctgcaagtgttggggcctcagcagcatgccctcttgccagataacgttgtggatctgcatctcagtcctccgtcctgtcaggttgagttgctgccatccggatacccgtctggtccagcacgatgtcggcacgggtcaactgtccgggagccaaaggcagcacccatcgccattgcacatggggcaagtcacgataggccgccagcacgccgacatagcgactgcgcggctcgacactcagcttgagcgccagccgttcgccggggcgcagttccagctcctcgccgctgacccaatccttgggcagtgcctgctcggcccggccgtagaggctgaagaaatcagcgttttcaaaggccaccggatgccgcagttccagcaattgcaccaccacgggcgaggggcggccgtgaaggtcggggttgacctcgtcgctggccgtcaatgtcaggtccagcttggtgagggtggaaaaaggtgaaaagttgctgcatcccgccagcaaccccagcactagcagcgttgataagacagcgacccgagaccggccaatcatcctgcgtaccccgcgtgaagcgtggagaccaggcgtacctgttcctcataggccttgcaaaagtcatgacgcagcatctgctcatccaagggttcctcgtcagtcagtcgcctgtaatggcgttggtaggcccgccaatgggcgccatcgctgaagaacctgggtgcattgccgtcacgttcaaagcgcagcagcaggcgcccaggcgcaaaggctgccactgcaccgcgtacggcagcccgacaggccacgaccagagccagttgatgaacctgcaagtctcggtacgcctggtcgaccgcttgctcggcagagaactgatcggactcaccgtcgccgagcaaaaaagccagggcggcatggctgtcggcgcagtttttcaacggattgcgggtattgagcagcggaaccgccaataagccgtggacctcgctgttgagttcatcacgggttcgcaggctttgctgcaacccttcgagggtttgcctgagcaggcccgccaccttgatcgccagggcttcgcgccccggcgtatcaagcgagtccacctgcatacccaatgcgtgggcgaactgcgcccagaatgcttgcgaggttgccggtggtggcgtgacaggaccaggtgatacaacgtccctggccggctcagcccattgcggcacgaacaggtgatcgtgctccaccgtgccctgacgtaacgcttcgaccgctgcctgcggcgtggtgtccaacgcgtccagctctgctgaggaattgccgagccgtgcctcgcgatccaatgcgtcgacaggatccagccccaggaacgcgtcgtctggaatcgtgtgttgccgagcaacaaccggccctgcctgcaacaccaggcgggcacggatatccagcagcccaagttggtacacatcgccgtcactgatgagccgtgcctgtcctttgcacaggcgctccatactgcccgacacaccgataccgttgctgctgatatccgtcaggaaatagcggccctctctaaaactgaccagggcgtggtgactggaaatcagacggttggcatccgggagcacccagtcacaactcgacttacgtccgatcacgccaccgacaccgtcaaacgtcttgcgctcaggtggctccccgcttgcggtgctacagagttcaaacatcaattgcatgacagcggccccctgttcagtgcccacgacgagtcgcatgggggtcacccaacggacggtagtcggcatcatcaaagacataattggcgttacagccactcaacaaactcagcgcaagcaccagggcttgccacggatgaaaaggcatcaggtatctcccatgaaaataagcggcccgcacgttccctgctcaaccctcctcgcgggcgtcccccacggggattttcaagcgcgccaggcggtaaagcagcgtgcgccgcgcaacgcccaactcacgggcggtacgggtgcgattgccacggttcttgtgcaggcaatcgatcaggaacacccgctctacccgctccaggcgttggcgcaacgtcgcatcgactgccccagtggcagccggcaccggcaaggacaggtgtgccggcaggatcacgccgtcgtcacagagcagcaccgcacgttccaccaggcatttgagttcgcggacattgccggggaaggcgtgacccgagagttgatcaagggctgcattcgaccattccaccggcacacgcccaagggcggcagaggcttgatgcgcgaattcccgcgccaacagcaacacatcgccgtcgcgctcacgcagaggcggcagttcgatgggaaactgtgcgagcctgtagtaaaggtcctcgcgaaagccgccttgggcgaccattgcggcgaggtcacgatgggttgcggcgatgatgcgtacatccaccttgtgggccgtactggcgcccaacggacgcacttcgccctcctgcaagacccgcagcaatttagcctgcagcgacagcggcatatcaccgatttcgtcgaggagcagcgtgccgccgtcagcgctgtcaaacagcccggtgtggttacgctcagccccagtgaaagcacctttgcgataaccgaacagctcactttccagcagcccttcgggaaacgccgcacagttttgcaccacaaaggctttgctcctgcgcggccccgcagaatggatcgcccgcgccacgacctccttgcctgtaccggtctcgccacgcagcaacacggtgtagggcgtatgcagcaccttgccgatcagacgatacgtctcgtccatagccgtactgctgccgatcaacccgtacgctgaacgcggcgccggcaggcaagcctggggttgggcaacacgtgccgtggcacactgacaccgcagtaaagcgcgctgcatcaaggcaaggctgcccagttggctcaaggcggcggtgtaggcctgcaggtttttccgatgctggctggcacacagcaacacacccttgatgcccttgcctcggtcaaacaacggcacacatgccaacgcttgccagggggtcgccatgaccggcaggaaaccgtactcgtacacgctgcctgagtgtgcttccaggctgagcgcggtttgctggttcagcacatagtgcagcacctgttcatgctggaaatccttggtacaggccggatcgccagggcaaggcatgccgtgcaaatgctgggcgatcagttcaagccggccagtggattcgttgcgccagtaccattggctgaggtcacactcgctcagttgcgccgctgcggcgacacacaaaccggggagagtggctgcgtcgtccgcgctgcccaggcggatgaacccgtcaagcagcgcatcggaacaggccgccgaacggggcagcagagtgagcagccgatcctccctcattggctgaactcacaggttggaacaccgttagccgccaaccgcgcatggacctgtgacacaggttcacctcgggccatggcttgcaatcgtcgatcgaccacctgcggcaacaaatgcagctcgatccattgatcgatataacgcgcaccactgtcatcgtgggcgcaccgctcggccatgtgctcaaccagctccggcgtgtagctgaatgccaggctgcgcagactcaagcgttgtcccaggcgttcgagcttgagccttgccaagtcatgcaggacgtcatccgtgaccgggtaatacggcacgacacgcatcctggccaataacgcggctttgaagtggtcccgcaattgcggcaggatcgcctcatgcagcgtttgcacgtcaggtcgccggccgcctgcgcacaattgcccgatgcgctcactgcccaggttggacgtcatcaggatcagcgtgttgcgaaagtcgatttcccggccttccccatcattggccaggcccttgtcgaaaatctggtagaacaggttcaacacttccgggtcggccttctcgacctcatcgagcaacaccaccgaatacgggcgttggcgcacggcttccgtcaacacgccgccctcgccaaaaccgacataaccgggcggtgcgccaatcaaccgggacagggaatgtttttcctggaactccgacatgttaagggtggtgacgaagcgctcaccgccatacagcaggtcgccaagggccagcgccgtctcagtcttacccacgccactggggccgaccagcaggaatacgccgaccggcgcgtcagccttgttgagcccggcagcaaccgcacgcagattgcggtccagggcctgcaccgcttgctcctggccgagaatgcgcaggcgcaacgcatcggcaaaacccagcacccggtcactgtgctcaagtgccagttgttcaaacgggatccccgtccaggcactgatgacctgagccaccaggcgggggcacacctgctgcgtggtttgctgctgttcaagccagcgttgctcatggtccaggcgctcaccgtccagcgtctccatacgctggtccaacgcgtgcaaggtctgttcgtccacgggaaaaccttcgtcccggtctctgctcaatgcctgaagctgccgcgcgccttccgcctgttctgcataaaggtgttgcaacgcctcaggcgcggtctcgcggcgagtgcgcaaacgagcgcaggcggtatccagtacatctaccgccttgtcgggcaactgacgcccggccaggtaacgggcgctcatctgcgccgccgcgaccaccgcatcgtcccgcacgtaaacgccatgactgcgctcatacaccgggactagtccgcgcaggatcgagatcgcttgctcgacgctgggctcaccgacccgcacaggctggaaacgtcgcgccaatgccgggtctttttcgaagtatttcttgtattccgtccaggtcgtcgcagcgatggtgcgcaactcgccgcgggccagcgccggcttgagcagattggcggcatcggacgcacccgcctgcccacccgctcccaccagcgtgtgcgcttcatcgataaacaggatcatcggtttcaccgcggcgttgacctcatcgatcacacccttcaggcgtcgctcgaactcgcccttgatactggcaccggcctggagcaggcccatatccaaggtcagtacccgcacctctttgagagactcgggcacctgtgcagtggccacccgcagcgcgaggccttcgacaacggctgtcttgcccactccggcttcgccgaccaggattgggttgttcttgcgtcgacgcatgagtatgtcgatcaactggccgatctcaacgtcacgacataacaccgggtcaatacgcccttcatgggcctggcgtgtcaggtcgtgagtgaagcgctccagcagtgattcgccctggggcgcggggtgtgtacgagacgcctgactcaacacgaacgcctgcacacgctgtggatccagccggctcagaaaaacctgataggcgctgcccgcgtgctgcagcggatgacgcaagagcgccagcaacagggcgccgtgatcgacctcaatgtgtcgcagttccaaatgagcaaccatcgaagcctgttgcagccattgcaccagtgcctgggcaaacaccggattgcgtgacgcactcgcctcccccttggtttgcagcgtggcttgcagttctgcggtttcaatatcggcatccttcagcgcccgcaccagcaggccatcgtgatgttccagcagggtcaacagcaggtcttccaccagcacttcccggccgccgcgcatgacgcagcgctcggcggaacgctccaggtctcggcgggcctggggggtcaatgcctggataagttgttgcaggtccacattcatcatcctgattcatccctaataagcgttgccaggcacaatgaccacaccgtcggcgcactcatgcgccagccaactggtccagccgaggcggcagacgttgtgttcaccgatgtgcaaaggccggatctcttccttggccatgaccaggcgcacgtcatagtccaaagggtcccgcgccgtcaggcgcaccaacgaacacagcagcggatagtccgcgccggtcggcaaaaaaccatggaatcggtcccaccccagcccctgcagatgcaccctgaacttgccgttgcgatcagccacccggctgcccagcacctggtcatggccaagggtgctgttcgcggcgccaagccgatttcgctgcgactcggcgatgaccacgctgcgcaggacccactgctcgacgaacaaacgacgatgcttgaagtagtaacgcagcaccgcctcgatcaaggccgccgaatgcacccgcaggctgagcaaccccaggtagggcaacagtcgcttgccattcagttgcgtggcgctgcggacctgcggcccccttaacccgatcaacgcaaacatctgctcggagaaggcatcaccggcgcttgcctggaaacacgcccgatagcgatatttgcgccagatcggcaacatcagccgttgcagacggtggtggaacacgtcaaggaagtcccgggttgcattgccacccaattcgtcggtgcacgcctgctcaccgtaaaacgccggcaatggcgagcccgcaccacacaggcccagcacgttaagacgcaaacgcgcacgcaactggccgtgctcgataaaaaacaccacccggtcgatatcgtgaccaggaaaacccaggcccgggttggcctggaactccagcaagtcgtacagcgtgtcgtcatccagcaacggatgggcatcgcgcagacgctggatgacccgcaggaccgcctgaaacagcgagtactcgcggataacccgggtcagttgtgtcaaagcgggggctgctggcccatccgtggtggccataggtacacgtctccttgtgtgctgatgactcttagttcgtggtaagcgttgaggctggcgtacagcgcgaagaactcgttgagcaccgaggcgaacacaaacacttcgccctcccccaggaagccctggggatcgatgctcaagtcgatgcgtaacccgcgaatcggcaagccgtggagcaattggtcgaccgctgtgtggctgaccgagcgcatcgcgcctaatcgtctctcgctgaccttctgcgcctggcgatcgtgatagcgtggtagatcgtaggtttcgaggatcactttcaaggcatggatgtcagtcagtgacaggtagttgagcgacatgttgctgatcagccgccagagaaagtcccggtccagaggtggagtaaaactggctgtcggtgcgcagatattccggaacgacagcccttgcggcgtctgctcgcaagcctggttgatagcgccgacctgcaattgtcgaggcaggttgtgattggtgcacgtcagctcgatcgacagtgtttgctggtccaactccagaccgctgcccaacccgagccaggtatccagcccggtatgctgcgccgatggccgctggcgaatgctgtaactcgccggcccctgggaacgcgcggtatacccctcatgctcgaaggattcaaagggcacgtaggcctgatatcccagccctccgggatgccaacccgtgacgctgtctacggaaaatacactggcgttcccgcgtgagtactcaccagggatcagcaggtattcgtcctgttttccgtccaggcggatgggtaccgcgtcatgcttgaacaggttgacgatgggggtgcagtacagcttcacgttatccaggctgggctgtctgggttctcgccatggcctgcccaatcggaagcgcaacaccacgccgcacacctgcttgagcagttcgccaggtaatctttgcagtgcccccaacccgcccacatcgacaaacaggtacttgtcgggaaaggcaaaatactcctgcagatggcgatagccgccaaacgtattcggcggatacggaatcagcgcctgctcctcgctgaaccctaccggctgaacctgatcggcgcccagaaacagcgatatcacttgcccatccaccccgtgaatcggcatgccatcccgaccgaaaggcagcaactcgataccctccagatgacgcaacagactcaggtacaacgcctggctgatgtagcgatcccccgccagatgcagacgtaactgatcgaagtgccactcactgaagttgccttctgcactcatctccaggcgcaggctcaaacttccccgttcagcctgggcgctgtagtccagcgcactcagctgcaacggcaaaacctgagtggcgtaacaggtacgaaagcggcatcgttcgtcattgactgcggcactttcaaccggcgtatcgcgcgcgacccacacaccagggcctgagtgtttcagcggatcaaactgcaggatgctgaaggcaggcagcgggcgcatgtagttgggccagagcaactgcatcagcgaatgcgtcagctctggaagctcgtcatccaatttctggcgcaagcgcccggtgagaaacgcaaagccctccagtaaccgctctacgtccgggtcctgaccggcttccgcaagaaacggagcaagcgccggattgcgctcggagaagcgtcgaccgagctgtcgcagcgcactgagttcgctctggtagtaacggttaaaggtcatcaggcatgacctctacccgaccggaatcagagagccgcgcggtaaacaccaccggttgagcgacacccttgaccaccagggtggcttcgatagcgaaggcaagtgccagcgggtcatgatcccgtggcaacgtcatcacttttacctgcttcaagcgcggctcgtaagctcggataaatcgctcgatcaacagacgtgactgactcagcgattcatgcaggctctgattcatatcattgaggtcgggcataccgtagtccggcagtgtctgaacgctgccggcacggatactgagcattttccccagatggtgcgcgacagatgtcacgctactggcgggggttgccgccggacgctcaaggcgctcgaacaggcttcgataaccgcgcacttcctggtccttgctcattctttgtcgagcttgccgacgagggatagcgtgaaatcagcgcccatgtacttgaaatgcggtcgcacactcaggttgacgcgataccagccgggctcaccctcgacatcactgacgacgatgcgtgccgcccgcaagggccgtcgcccacgcacttcggcgctggggttttcctggtcggcgacgtactggcgaatccatttattgagttccagctccaggtcagtgcgctccttccatgaacccaattgctcacgctgaaggaccttgaggtaatgggccaggcgattgaccaccatcatgtacggcaactgggtacccaggcgataattcaactcggcttccttgccctcggggctgagcccgaagtgtttcggcttttgcaccgagctggcggaaaaaaacgccgcattgtcactgcccttgcgcatcgtcaaggcgatgaagccttcttgcgccagttcgtattcacgacggtcggacaccaacacttcggtggggatcttggtttcgatttcccccatgctctggaagtgatgcaacggcaagtcttccaccgctccaccactttgcgggccaatgatgttcgggcaccagcggaaccgcgcgaaactgtcagtcaggcgcgtggcgaaggcgtaggccgtgttgccccacaggtagtgctcgtggctgttgaccacgttttcctgataggcgaaggtcttgactggacactcaagcggatcatatggcgtacgcagcaggaatcgcggcacggtcaagccgatgtagcgcgcatcttcgctttggcgaaagctttgccatttggcaaattgcgggccttcgaaatggtccttcaggtccttgaggtcgggtaaaccggtgaaactttccaagccgaaaaacgccgggccggcagctgcgataaatggtgcatgggccatgcaggccacactggaggcgtactgcatcagctttacatcgggggcgctgggagacaggaagtagttggcgataatcgcgcccaccggctggccaccaaactgcccgtactccgcactgtagatgtgtttgtacaacccggactgggtcacttccggcgaatcttcaaaatcttccagcaggtcttgcctggagacgttcaggagttcgatcttgatgttctcgcgaaagttggtgcgatcgaccagcagttgcaagcccttccaggacgcttccagcgcctggaagtcgggatggtgcagtatctcgtccatctgcaggctgagcttggtgtcgatctcggcgatcatccggtcgaccaggcgtttcttgacgggctcgccacggttctggggcttgatcaactcttcgatgaacgccgagacaccgcgcttggcaatgtcataggcgtcgtcgtcggcgctcagtaatgtctgggcaacgatgttatcgaggatgctgtactgatcagaaggtcgtgccggcagcgaatgctgttgtgtcgtcatggggtcagtgtccttttactgaaaaatgtcaggcgtcggggctgtccagcccaagttccgccagtacccgtgcgcgggactcatcgtcggccagggtttgttcgatcgccttgcgaaagctcggggtgttgcccaacggccccttcaacgccatgagtgcctcacgcagcgccatcagcttgtgtaactcgggcacctgttccaccaggttcgccgggttgaaatccttcatggcattgatgcgtacctgaatggccaactcgtcaacgccagcctcttcctgcaaacggttgggcacgctcaacgtcaagctcaatgcctgcttggccaacacgtcatccagggtgttcttgtcgatagcgatgggcttgcgatcttcaagcttgcgcgcgtcctcacgctgggtgaaatcgcccagtaccaacagcttcaatgggagctcgacttcttcctgcgccccgccgattgcgggtttgaacgtgatattgatacgttccttgggggctaccgaaccttctttggccatggtgtctctcctttttcaagtggctcgaaagcctattcaagtaccgcttccagatcgaagaggcacagcctgcgatgggtgtcttccttgcgttcgcgcacggcatggttttgtggcagcaggtcgcagcagcggtgcaggagctgcgtcacttccagggccagctctggctcccagcgctccaggcccgtgcgttgcagttcgtggtcaagctgttcgagctggatcttcgccagctcatgcttgcccgcctgtatgcacagacgcgcttgggcgagccgccaatgaaaacgtgcgcgatcactgcgcgcagcctgcatgccttgcttgagctctcggatggcagacttgagcccgtcctggcgcagccgctgtgtcaccgtctgcaaggcgatcgcccagggctcggcttgggcatcaatgagtgctgcgggcaattcaggcctgtgcaggtgatgggcaacccgctgggagatccagtcgcgagtggctgcgtcggcaaagggtgcgccgtcgtgaaaacgaaacgcaggcaggtccggcaagcgttgcagcaacagcgcgaaggtcacttccagctcggtcatggccaggtcggcctgcaggacctccaggcattcccagagcatgcgcagaccatcgaaccagaacatcgccccggcaagactggcctcaagctcaagcaccaggtctgcgtgatggccttgtgcaaagcgctcctgataacgcttgagcttgtcgggagccggcccgcgcaatgcggtcacctgctcgttatcggcattcgggtagctggcgagtgccagccatgccagtgtccggctcaaacgcaacgcgcgcaggtcggtggcgttctggcgcagccaccaggcacagagtgggcgggcctgctcctgcaaggtacggagcaccttgtgcgcgtccttttcgctctccaccgctgcttcgggcttgcgcagttggctggcggcctgcttgacttgctcgataaccccgctcaaccccgccaccggggtatcgtcctgcgctgcccgctccaatcgctgcgccaattgcctgcgaaccggcaacagcagcggcgcatcatcccccaggtgctcggcccaaagctcgtccagacgcaccaggtgctcaagcacggcgcggaacaaaggctgctggttctgcagcgccaggccctgcgtgaacagcggctcaaggcgcaataccagccatccgaatgcggcaccgcgggtgcgcggtttttccgggtagagcaccgaccactgatgctcacagaggtagcgcaacatcccgagccccgccagcagccccgggtaggattcacgctggtgcaacgcccaggtcaaccacacagccacccgcagatccttggactggtggcgtagcaggttctcgctggtttccagcaccttgtgccagtcgggctggctgccggcatgaatcgattgtgccttggccagctcggactccagcacttcatattcactcgaaaagcgcatgtcgctaccggcaaaacttgtttgcagacagggtgatcgtgcaacttctagataataatcataccggctatccgaataaatcattttccaccatgcacaactaaaaaaccaaacaaaccaactaaccacgcaagtaatgcgtgacagtgggctatcttgagttcgcattttcctgcgaagccctcgaaccttagtcatgcccaaaacattcagcaagcgatggaattacacttagtccttttcctacaaacccagctaccaccgggaatgcgcaggattttgcgcacctaaccctgcatagtcattcaactaatcatccaacttcagcatttatcgacatttcaagatgagcaactaaatgcgcacccatgcgcaatcaaatacacgtaattaagcccagtagcagcctatcgcgctgaatatccgacctactacaacagcatcaccctgattccattggcgcctgcactttcaggcacgcttcttgttataggcatttgcccagccgaaaacttatcggttggaactacctcatcaatcagacaaggaaccccgtcatgccaacacccgcgtatctctctattaccggtgtaaaacaaggtttgatcacggcaggcacgtttacccaggactcggtaggtaacatttaccaggaaggccatgaggaccagattctggtccaggcgttttctcatcaggtgatcattccccgcgacccacagtcgggccagccaaccggccagcgggtgcataaacccctgatgatcagcaaagtgttcgataagtcctcgcccctgctcttcagcgctttgaccagcggcgaagaggtcaagtgccggctggaatggctgcgcacttcgtcggccgggacgcaggagcattacttcaccatcgaactggagggggcgaccatcgtggatatccagtcacgcatgcccaactgccaggaccccgacaacgcccatttcactcacttggaagatgtgtacttcacctatcgcaagattgtgtggactcacgaagtgtccggtacttccgggtcggatgactggcgcagcccggttgcgggttaaaccggcttgacgcgggcgcggcgccaaggaaggcgccgtttccgtaaggcaactacaccatcgccaaaggatgcttgcgttttggcgcgccgaatacccgatcgatcgcgtccaggtcgtgctcatccaacaccagcttggctgctgctgcgttgagtcgcacgtgctcgggcgtaacggccttggggatggcgatcacaccgtcctggcgcaacacccaggccagggagacctgggcgggtgtgacctcgtgacggcgggcgatctgcttgagggtggggctggacagcagttcgccgccctgggcgatcgggcagtacgccatcaagggcaagtggtgctgttgccaccagggcagcaggtcgaactcgatgccgcgttcttcgatgttgtagagcacctggttggtggcgcaggccggggaggcaagttcctgcaggtcggccacgtcgaaattggagacgccccaacgtccgatcttgcccgcttcgcgcaggcgttcgaaggcttcgaccgtttcttccagcgggtactggccgcgccagtgcagcagatacagatcaatgtagtcggtgcccaggcgctggaggctggcctcacaggcacggggcacgcccttgtggctggcattgtgcgggtagaccttgctgaccaggaacacctggtcgcggcggccacgaatggcctcgccgaccaccgtttcagcgccgccctccccgtacatttcggcggtatcgatgagggtcatgccctcgtcgatacccagttgcaacgccgcgacttccgcgcggtgctggtcggggttttcgcccatgcgccaggtgccctggccgatgacaggaacgggaacacccgccagatcaatggtatgcatgacaacctcctgatgagttcgcgaattaacagtgtggcattggccggacaaaagggttcaatcgaagtatggttagcctctgccaagtcgccaggaagtctctgcaatgctgtttgtcgtcatgctcgggggtaagcacccacgggcgaaaattgaagtgcacgatgtggtgtttgcagtggcggacacgctggaagcagcctacgcgcaactgcgcgccgattggtttggcagccccaagggcgtgcatatcgactcctggatggcggtggatggcgtcgacggctggaaggtcgaactcagccccctggcacctgccgccggcgcacaccacctgtacttcatcaacctgggcggttatgaggccaacagttttggcgaggcccaccactacctcctggtggccgcccgcaataagcaggaggccacgaacaagggcaagcaacagatgctgcgtcactggtcccaggcccataccgatgaagtactggacatcgacgactgcttgcccatcgacctggtggacggtcgctatatccacctggtgcaaggcccgcatcggccgatcatccagcagaacgactacatcgtcctggcctgaaccctacccgacagtgcatgcgcagctcatcgaatggctcacccacagcggcgctatggcccgtgcctgagccactcgggcaatccggcggaactttgccgggaaataaccgcctgaatccggtaggctcaccttttttattcaaggagttacttcccatggccaaagccaccgcccgtcacatcctcgtttccactgaagacaagtgcaacgaactcaaggcccaaatcgaaggcggcgctgatttcgcagaagtcgccaaagccaactccagctgcccatccagccgccaaggcggtgacctgggttcgttcggtccgggccagatggtcaaggaattcgacaccgtcgtgttcagcgccccggtcaacaccgtgcaaggcccggtaaaaacccagttcggctaccacctgctcgaagtcaccagccgccaggactgatcccgcctgtgctgatgcaataaacaacggcccgccttttggtgggccgttgtgcatgtgatgactggcgacgctgatgccgttagcgtacaaatcccttttcttcttcatacggcgttcaaggctgacaatgcgattggctttttcttacttctttagctcgtccctggcactgctgctggccagcactgccgtgatcgcggcgcctcaaccgtacctgacggtgtatggcgaaccggccaagtaccctgccggctttacccatttcgactacgccaaccccaacgcccccaagggtggcagcctgcgccgctcggccatcgagatcgggcgcttcgaccatgtgttgccgtatatcgacaaaggcatcggggtgtcccaggtcgacggctggctctacgcgcccctggcccagcgctccctcgacgagccctacacggtctacggcctggtcgctgaaaaaatggagcgcgccgacgacggcctgtcgctacgctttttcctcaaccccaaggcgcgctttgccgatggcaagccgatcaccgccgaggacgtgcgctacagcttcgacctgctgatgacccagggcagcttgcgctttcgcaccctgttcgccgacgtcaagcacgtcgaagtcgaaggcgagcgccaggtgcgtttcgatttctccagcaatgaaaaccgcacactgcccctggatatcgccaccctgcctgtcttccctgagcattggtggaagacccgtgactttgccaatggcggcggctatgaagccccgttgggcagcggcccctataaagtcagcaagatcgactccggcagcaccatcacctttacccgcgacgcgagctggtggggcaaggacttgcccgtcagccgcggcctgtacaacttcgatcacctgagcctggagtatttcggcgacaccgaagtggcccgccaggtattgcgcggcggcgcctacgatttcaaccgggagttttccgccactgggtactccattggctacaacggcccggccctggatgatggtcgcctgcaacgcgcgcacctggccagggagatgccgcaaccggcccagggttacgtgttcaacgtacaaaaaccgatattcaaggaccgccgcgtgcgccaggccctggcgatgctgtgggattttgaatgggccaaccggcaaatgatgcggaacatgtacatccgccagcagagttacttctccaacagcccgctggccgccagccagccgccaacaaaagaagagctagcgattcttgaacccttgcgcggccaggtccccgacgaggtgttcacccaggtgttcaaggcgccggtcactgacggcagcggtgtgatccgcgacaagcagctgcaagccctggccttgctggaggaagccggctggaaaccagagggtgacaaattggtgaacgccgaaggcgaaccactggaattcacgttcctcaacactcagaacggcctcgaacgtctgttgttaccgtacaaacgtaacctggcgcaaatcggtattaccctgaatatccgccgtatcgactcctcgcaatacgtcaatcggatcatggccagggactacgacatgatcgtcatcggtttccccgtcaccacgtcaccgggcatggagctgtacaactatttcggctcggcggccgcctacgatccaggcgccaacaactacgcagtactcaaggaccccgccgtcgacagcctgatcaagggcctggtcaaggccgatacccaggcgcagatgctcacctacgcccacgcgctggaccgggtgctgcaatggaactacctgtggatccccaattactacccgcccggcacgtccgccgcgtggtggaaccgtttcggccgcccggccatcgaggcaaagaacgacgaagccctggaaacctggtgggaaatcagccccacgccgctgacgaatgaacaaatgaacgctgagctgaaaaaacgcggaggtgcgcgctgatgtttgcctatatcgtgcgacgcctgctgctgatcatcccgacgctggtgatcatcctgctggtgaatttcgtgatcgtacaggccgcccccggcggtccggtggagcaagccatcgcccacctgcaagggatcggcggcggtggcgtcggcggttcctccggcgaaggcatcagcggtggctcccgcgccagccggggcctggacccgaagctgatcgctgacatcgagaaacagtacggcttcgacaagcccgcgccggagcgcctgtggctgatgctcaagagctacgcccaactggacttcggcaacagcttctttcgcggcaagacggtgatcgacctgatcctggaaaaaatgcccgtgaccatttccctcggcctgtgggccacgctgatcacctacctggtatcgatccccctggggatccgcaaggcagtgcgccacggcagcagttttgatgtgtggagcagcaccgcaattgtcatcggctatgccatgccggcgttcctgttcgcgatgttcctgatcgtggtgtttgccggtggcacttcgctgaactggttcccggtacgcggactggtgtcggagaacttcgaagagctgagcaccgtgggcaagatcgccgattacttctggcacctggtattgccggttacttcactggtgatcggcgggtttgccacgctgaccatcctcaccaaaaactcgttcctcaatgaaatcacgcgccagtacgtggtgactgcccgcgccaaaggcttgagcgaacgacgcgtgctctacgggcatgtgttccgcaacgcgatgctgctggtgatctccggaattccccaggcctttattgccgtgttctttgccggttcgctgctgatcgaggtgatcttctccctcgacggcctgggccgcatgagctacgaggcggctgtgtcccgggactacccggtggtgttcggttcgctgttcatcttcaccttgttcggcctcttgataaaactcatcggtgacctctgctacaccctggtggacccgcgtatcgacttcgccgcgaggaacgcctgatgcttaatctgtctcccgtggcgcgtcggcgtttcgagcggttcaagaaaaaccgtcgcggctggtggtcgctgtggctgtttatcggtctgtttatcctgacactgggcggcgagttgatcgccaatgacaaacccttggtgctgagtttcaagaacgagctgtatttcccggtgttcaagcgctacaccgagcaacagttcggcggccagttgccgttccaggccgattaccgcagtgactacgtgcgaaagctgatcgagcaggacggcggctggatgctgttcccgccgattccgttcagcgacgacacgcccaactacgagctgacccgccctgcccccagcccgccctcggcggtgaactggctgggcaccgatgaccagtcgcgggatgtgctggcgcgggtgatctttggcgcgcgcgtgtcgatcctgtttgccctggcgctcaccgcgatcagcgcggccatcggtattgccgccggtgcgttgcagggctattacggcggctgggtggacctgatcggccagcgtgtgctggaagtgtggtccgggttgccggtgctgtacctgctgatcatcctgtcgggttttgtagagccgaatttctggtggctgctggggatcatggcgctgttttcctggctggccctggtggacgtggtgcgcgccgagttcctgcgcgggcgcaacctggaatacgtcaaggccgcacgggccctgggcctgggcgatggcaagatcatccgccggcatatcctgcccaacgccatgacggcgaccttgagttacctgccgtttatcctgaccggtgcgatttctacgctgagcgccctggatttcctcggtttcggcatgccggcaggcagcgcgtcgctgggtgagctaatcgctcagggcaagcagaacctgcaagcgccgtggctgggcctgaccgcgtttttcaccctggcgctgatcctgtcgctgctggtctttatcggcgaggcattgcgtgatgccttcgacccacgctcatgagtgactgcctatgaacctgatcgaaatccgcgacctcagcgtcgcgttcagcggccagaccgtggtgcgcaacctgtgcctggatgtgcgccccggcgagtgcctggcactggtaggcgagtcgggctcgggcaagtcggtgacggcccactcgatcctgcaactgctgcccgaggccggcactaaaaccaccggttccatcaagtaccgtggccaggaactggtcggcgcttcgaccgccaatttgcagaagctgcgcggcaaccgcattgccatgatcttccaggagccaatgacctcgctcaacccgctgcacagcatcgaaaagcagatcggcgaaaccctgctgctgcacaagggcttgggcggcaaggcggcgcaggcgcgcatcctcgaattgctcgaactggtgggcatccagaagcctcaggagcggctcaaagcctatccgcaccagctctccggtggccagcgccagcgggtgatgatcgccatggccctggcctgcgagccggaactgctgatcgccgacgaacccaccacagcgctggacgtaaccgtgcagcgcaagatcctgctgctgctcaagtccttgcaacaacgtctgggcatgtccctgctgctgatcagccacgacctcaacctggtgcgcagcattgcccagcgcgtatgcgtgatgcgagccggcgagatcgtcgagcaggccgactgccagacactgttcaacgcgcctcaacacccctacagccgcctgctgctggatgcagaaccggccggcgatgcactgtgcagcgatgcacgcgagacggtgttgcaggtggatgacctgaccgtgcaattcccccttggcggcgggttgttccggcgcaaaacgtatttacgtgcggtggatggcatcagcctgagcgtgcagcgcggcaagaccctggggattgtcggcgagtccggctcgggcaagtccaccctgggccaggcgatcctgcgactgctggactccagcggcagcatccgcttccagggtgaagccctcgacccgctgaaccaccagcagatgcgcccgtggcgcaagcaaatgcaggtggtgttccaggacccttacggcagcctcagcccacgcatgaccgtggagcagatcatcagcgaaggcctggaggttcacgcaccgtgcagcctggccgaccgcgatgcgcaggtggtgcaggtgctcaaggacgtgggcctcgatcccgccagccgccatcgctacccccacgaattttccggcggccagcgccaacgcatcgccatcgcccgcgccctggtgctcaaaccggcgctgatgttgctcgacgaaccgacctcagccctcgaccgcactgtgcagaaacaagtggtggcgttgctgcgtgagttgcaggagaaatacggcctgacctacctgtttatcagccatgacctggcggtggtgcgtgcgatggcccacgacatgattgtggtcaaggacggcaaggtggtggaggccggcgtgagccatcaggtgtttgatgctccgcagcatccgtacaccaaggaattgctggcggccgcctgcgggctgtcgtcatgagtaccagcctgacggattaccaacaggttcgcggcctggccatccagtcgctgttcgagatcatcgagcagtccagcgaaggcacggtgattgtcgaccgcgacgccaatatcgtgtggatgaacgagcgctacgccaggcgttttggcctcaaaagcgccgacgaagccatcggccagccgtgcgagcaggtgatttccaacagcttgctgcgccaggtggtacgcaatgaccagcccatattgctggacatccaggacacgcccaaaggcccgttggtggtgatgcgcttgccgatccacaacgacgccggcgcggtgatcggtgcgatcggctttgccttgtttgatgagctgcgcaacctgtcgccgctgatcgaacgctacctgagcatgcagcaggagttggcgtcgacgcgctccctgctgcgttcgcggcagagcaaatacaacttcgcgcattttatcggcaccagcgccgccagcctcgaagtgaaacgccgcgcgcggcgcagtgccagcgctgaatcgccggtgttactgctgggcgaaaccggtaccggcaaggagttgttggcccaggcgattcacggcgcctccacccgtgcgcacaaggcgtttgtcagcgtcaacagcgcggcgattccggctgacctgctcgaagccgagttcttcggcaccgcaccgggcgcgtttaccggcgccgaccgcaaaggccgccccggtaaattccagattgcccagggcggcacgctgttcctcgacgaaatcggcgacatgcccctgcccttgcaaagcaaactgctgcgggtgttgcaggaaaaggaattcgaaccggtcggttccaacgagatgctgcacagcgatgtacgggtgatcgccgccacgtccatggacttggaggcggcgatcaagcgcggcgaattccgcgcggatttgtattaccggctgaatgtgctgccgatccaggtgccgccgttgcgtgagcggcttgaagatattccggcgttgagcgaggcgattctggaggaactgcgcagccagcatgagctggaccgtgaagccctggcgttgctggcccagcatgcgtggccagggaatatccgcgaactgcgcaacgtacttgagcgggcggcgttgttgagtgatgaccttgtgttgaatgccggggagattcgcgccgcgatcggcaccttcacccccgtggcgcgtggcagtgccgtcgcgacggtcgagggtgaaagcttcagtgcggcgcgggagcggtttgatcggcagatcatcgcggcggcattgagcgcgtgcgaggggaatgtggtggaagcggccaagcgactggggcttgggcggtcgacgctgtacaagaagatggtggcgttgggcatcgactgatctcaaaatggagacacagctctcaatatagagataacccaatgtgagagggggcttgcccccgatggcagtgtgtcagtcaactcataggtgactgaagtaccgctatcgggggcaagccccctcccacattggtttatcatttgtctcaagctagagacaatattcggaacatccaaccacaacctataaattattcataaatttcaataagttaagaacatggcacatatctcgctatagccctctcctaaagcaacaccccacaaaaataacaatccgatggagacacaccatgagtgtgatcattgccctggcagccctcgcgctgctgatgctggctgcctaccgtggctatagcgttatcctgtttgcccccattgccgccctcggcgctgtcctgctcaccgacccgtccgccgtcgcccctgcgtttaccggggtgttcatggagaaaatggtcggttttatcaaactgtatttcccggtgttcctgctgggcgcggtgttcggcaagctgatcgagctgtcaggcttttcgcgctctatcgtggccgcggccattcgtttgcttggcacacgccaggcgatgctggtaatcgtgctggtctgcgccctgctcacctacggcggcgtgtcgctgttcgtggtggtgtttgcggtgtatccatttgcagcggagatgttccgccagagcaatatccccaagcgcctgatcccggcgaccatcgccctcggcgcgttctcgttcaccatggacgccttgcccggcacgccgcagatccagaacatcatccccagcaccttcttcaacaccaccgcctgggccgcgccgtggcttggcttgatcggcacgattttcgtgttctgcgccggcatgctctacctggcgcgccagcgcaacaaggcgcaacttgccggtgaaggctatggcacggagctgcgcaacgagccggaaaccgccgagaacctgaccctgcccaacccctggatcgcgctgtcgccgctgatcctggtgggcgtgatgaacctgctgttcactcactggatcccgcagtggtacggcaagacccacagcctcagcctgccgggcatgagcacgccggtgaccaccgaaatcgccaagctcaccgcgatctgggcggtacaggcggcgttgctggtggggattatcgtggtgctggtgttcggcttctcggcgatcaagagcaagctggccgaaggcagcaaaagtgcggtcagcggtgcgctgctggcggcgatgaataccgcctcggaatatggttttggtgccgtgatcgcctcgctgccgggctttctggtgctggctgactggctcaagagcattcccaacccgctggtcaatgaagcgatcaccgtgaccctgctggccggtatcaccggctccgcgtcgggcggcatgagcatcgccctcgcggccatgtccgaaagctttatttcggcggcccatgcggccaatatcccccttgaagtgctgcaccgcgtcgcggccatggccagcggcggcatggacaccctgccccacaacggcgcggtgatcacgctgctggcggtcaccggcctgacgcaccgcgaagcctacaaggacattttcggtatcacgatcatcaagaccctcgctgtgttcgtggtgatcggtactttctacgccaccggcattgtgtgaggtttgcatgacgacattgaacggcaagaccgccctggtcaccggctccaccagcggcatcggcctgggcatcgccctgagcctggccaaggctggcgccaacctgatcctcaatggcttcggcgacgccagcgcggtgatcacccaggtacaggcgttcggcggcaaggtcggccaccacccggccgacgtcagcgacccggcgcagatcgccgacatgctcgcctacgccgagcgtgaattcggcggcgtcgacatcctggtcaacaacgccggtatccagcacgtggcggcggtggaagacttccccgtcgagcgctgggactcgatcatcgcgatcaacctgtcctcggtgttccacagcacgcgcttgagcctgccgggcatgaaggccaagggctgggggcgtatcgtcaacatcgcctcggtgcatggccaggtgggttcggtgggcaaggctgcgtatgtggcggccaagcatggcgtgatcgggttgaccaaggtggtcggcctggaaaccgccaccagcaatgtcacctgcaacgccatctgcccgggctgggtgctgacgccgctggtgcagaagcagatcgatgatcgcgccgccactggcgtcgacccgcagcaggcgcagcacgacctgctggcggagaagcagccgtcgctggagtttgtgacgccgccgcagttgggtgagctggtgctgttcttgtgcagcgaagccggcagccaggtacgcggtgccgcatggaatatcgacggcggctggctggcccagtaacagcggacactggcgttcaaaatgtgggagggggcttgcccccgatagcggtgggtcagtcaccccatgtatcaattggcactccctcatcgggggcaagccccctcccacatttgaactgtattgtgtggaagacctagataagaacaagagaccttgctgatgtccgacattctctggcaaccctccccggaacgcatcgccaacacgcgcatggaccagttccggcgccacatcaacaagcgttacagcgtgcagcttggcgactacccggcgctgcaccagtggagcatcgaccaacgcccggatttctggcgggcgatcgttgactatttcgacgtgcagttgcgcagcccgcccaccgcggtgctgatcgaagacgccgagatgcccagcgcccactggtttcccggcgcgacgctgaattttgccgaacacctgctgcgccggcgtgatgatcacgtcgccgtggtggctatcgcagaagacggccagcgcgagcaactgacctatgccgagctggccgcccacgtcgccggcctgcaacgcagcctgcgcgctgccggcgtgacccaaggcgaccgcgtcgccgcgtgcatgcccaacacctggcaaaccctggtgggcatgctcgccaccaccagcctcggggcgatctggtcgtgctcatcaccggacttcggcacccagggcgtgatcgaccgcttcggccagatcgaacccaaggtgcttatcacctgcgccggctaccgctatgctggcaaagacatcgaccagaccaccaaactcaatgaaattctcgcgcgcctgccgtccttggagcagttgatcatcgtgccgtatgcgcgcccccaggccaggatcgaggactatcagacccacgcccgcgtcgcgctgtggcaagacgtctaccaacccggcggcgagcctgaattcgtcgcggtaccgttcgatcatccgctgtacatcctctactccagtggcaccaccggcgtgcccaagtgcatcatccacggcaccggtggcgtgttgctcacccacctcaaggaacacggcctgcacgccgacctgtcccgcgaggactgcctgttctactacaccacctgcggctggatgatgtggaactggctggtgtcggtcttggccctcggcgccacggcggtgctgtatgacggctcaccgtttcaccccggccccgagcgcttgatcgacctgatcgatgcggaaaaaatcagcgtgttcggcaccagccccaagtttctcgccacgttggaaaaggccggattgcggccgcgcttgagccacgacctgggcagcctcaaagggctgatttccaccggttcgccgctgtcaccgcagagctacgactacgtgtaccgcgagatcaaggatgagctatgcctatcgtccatgtccggcggcaccgatatcgtctcctgctttgtgatcggcaacccggtgctgccggtacggcgcggtgaaatgcagtgcaagagcctggcgatggctatagaagtctgggacgaccagggccggccgctggtcggcgaaaaaggcgagctggtgtgcacgcggcacttcccggcgatgcccatcggcctgtggaacgacccggaccgccagaagctgcgcgcctcgtatttcagccagtttcccggcgtgtgggcccagggtgactatgccgagcaacgcccgaatggcagcctgctgatccacgggcgctccgacgccgtgctcaaccccggcggtgtgcgtatcggcactgccgagatctaccgccaggtggaaaaagtcccacaagtgctggaaagcctggccatcggccaacgctggcaggacgacgtgcgcgtggtgctgttcgtgcgcctcaatgacggtatcgaactggacgaatacctcgaacagcagatccgccaggtgatccgtgccaacaccacaccgcgccatgtgccggcgaagatcctcgctgtcaccgatatcccccgcaccatcagcggcaagatcgtcgaattggcagtgcgcaatgtggtgcacggcgagccagtgaagaacaccgatgccctggccaacccccaggcccttgatcagttccgcaatcgcccggaactggcgcaaggatgaaaggtttcagcgctgacgtactcatttgaagacaaacccccaatgcatgctatttttcgggggtagtcacccatcgccgactgacgggataatgggtgttgtcatttttcaaagcgttacgctcagggctttttcatgattggaacatccgccggcagcgaagccgccgcattgattgcgcggctggactgggcgcaaagccctctcggtgaggccaaagattggccgcaaagcctgcgcacggcggtcgatatcgtcgtgcactcgccgatgccgatgctcctgctgtggggcaaccagctcacgcaactctacaacgacggtttcgcccaactggcgggcaacaagcaccccgaggccatgggccagccggcgcaccagacctggccggagcttgagagctttaccgcgccgatctacgacgccgtgctcagcggccaggtgcgcaccttcagcgagcagcgcttcgtactgcaacgccacaatcgcgacacggaaatctggctggacctcacctacagcccgatccgcgatgaaaccggcagcgtggccggcatcctggtcaccgccatcgaaaccaacgaacggcgcaaggcccagcacaacaccgagcaacgcctgcaactggcactggcggccaccgacgccgtcggcacctgggactgggacattggcgaagaccgttttatcgccgacacgcacttcgcctacctgcacggtgtcgaccccagcgatgcaagccggttgccgatcagcgcctacctgcaaggcgtgcacccggatgaccgtggcatggtggcgcgcagcatcaagcattgcatcactttcggcaccgaatacgccgaggaataccgcctgctgcaagccgatggccaactgcgctgggtgtttgcccgcgggcgctgctacaaggaccatcaaggccgcccggcgcgcttcctcggcgccgcgctggacctgaccgagcgtaaacacaccgagcaggcgttgcgccaaagccagaccgaactgcagttgatcatcaacgccatgccggtactgatcggttatgtcgaccatgaacagcgctttcgcctgaacaacagtgcgtacctggagtggtacggcatgacgccccaggaactgtacggcaagaccattcgcgaagtgctcggcgacgaggtgtacgccgggcgtgaagacaagatcgccgctgcgctcaagggcaaggcctgcagcttcatgaccattacgccgcaccaggatggtcgaccacgccatgccctgatgaagtacctgccacgcttcagcaatgacggttcggtgaatggtttctacatctttgtaatcgatgaaaccgaacgcaagctcaccgaagaagccctgcgtcacctcaatgaaaacctcgaagaacgtgtggcccagcgtacccaggcgctggccgaggccaaccagcgcctgcagaacgagatgttcgaacgtgaacgcgccgaagatgcattgcgccatgcgcagaagatggaagccgtgggccagctcaccggcggcatcgcccatgacttcaacaacatgctcaccggcatcatcggcagcctggacctgatgcagcgctacatcgccgccgggcgcagtgacgagatcgggcgcttcactgatgccgccgtgtcctccgcccaccgtgcggccgccctcacccaccgcttgctggcgttctcgcggcgtcagtcgctggaccgccgcccgctcgaccccaaccagttggtggcctctcttgaagagttgttccgccgtaccaaaggcgcgcatatcagcctcaaggtgcagctcggccatgacatctggccggtgaacaccgacgccagccaactggaaaacgccctgctcaacctggtgatcaacgcccgcgacgcgatgcccgatggcggagaactgctgatcgaaaccgccaacagttacctggacggcaccgacatcaccaccctggaaccggtcaaggccggtgactacgtgatgctcggcgtgtgcgacaacggcaccggcatggcgccgaagattctggccaaggcgttcgacccgttcttcaccaccaaacccatcggccagggcacgggccttgggttgtcgatgatctacggctttgcccagcaatccggtgggcatgtgaccatccacagcgaaccgggccagggcacctgcgtgcgcctgtatttgccgcgcctgcacggcacctccctggaaagcagcttgcccgccagccacagtgaagcgccggtggccctggccggtgaagccgtggtggtggtcgaagatgacccggcagtgcgcatgctggtggtcaatgtgctcgatgaactgggctacacggcgcaccaggcgggcgacgctcgggccgcactgccgctgctggagtcggatctgcgcgtggacctgctggtgactgacgtcggcctgccaggcatgaatggccggcagcttgcggaaatcgcccgccagcaccggccggggctgaaggtactgttcatgaccggttatgcggaaaaagccgccgagcgccagggtttcctggaagacggcatggacatggtggccaagccgttttccatcgagctgctggcgacaaaaatccgcagcatgatcaacgccaacgaatgagttcaggcataatcgcgcgccgtcgcacacctggtagagatcaatgaaagcccaagcccgtcatatcctggtgaaaaccagcgaagaagccgaacagctcaaacagcgcatcgccaagggcgaggcgtttgatgtgctggccaagaagtactccacttgcccgtccggcaaacgtggcggcgacctgggtgaagtgcggcccgggcagatggtgggggcgatcgatgcggtgatcttcaagaaaccggtgaaggtggttcacgggccgatcaagagcaagttcgggtatcacctggtgcaggtgttttaccgggattgatgggttggctgcagaccgctatcgggggcaagccccctcccacatttgaataggttcacaaatcaaactgtgggagggggcttgcccccgatccgccgcaggcggccattcacccccggggaatcagcgcccccggcacctggataacccgactggccaaccgatgcccagccaatgcagcctgctccggcgagcttcccttgagccgcccggccaggtacgccgcactgaacgaatcccccgccgctgtcgtgtccaccaccttttccaccttgatcgccggcacgcaaaagcgctcgccgttgcagcggatcaggcacgcatccgcgccacgcttgagcaccacctcttcaatccccggatacgccgcgaacacctgctcgctgtcggcatacccaaacagcgcacgctcgtcgtcctcggtgagcaaggcgatatccacttcggccaggacacgctcatacgcagcacgcgccgcctcgacgctcgcccacaatcgcggccggtagttgttgtcgaacaccaccttgccgccacgtcggcgggtttcgatcagggtttgcagcaagcgttcgcggccgacttcacccagtacggccaaggtgataccgctgaaatacaccacgtcatagcccggcagcgcggccaggatcggctcggctgccggcgtggtgaagcagtcgcgcacggcggcttcgttgcgccaatacaggaatttgcgctcgccattggcgtcggtctggatgcagtacaaccccggcagacgtccaggcaggcgctggaccctgcccaagcccaacccttcgtcgatccactgctggcacatggcgtcactgaaactgtcatcccccagggcggtgacatagtcgacgctgccgatgtcgcccagctcgcggcgcaggtacaccgccgtgttcagggtatcgccgccgaagctttggtgcaggctgccatcggcgcggtgttgcagttcgatcatgcattcgccgatcagggcaatgcggggttgggtactcatagtgatggtctcgggtgtggctgatggcctcatcgggggcaagccccctcccacagtttgatgtgtgaacctattcaaatgtgggagggggcttgcccccgataggatcgacgcggtctagaagcaggtaggcagggactcgatcacctgcaatttttcatccaccaggcaaccgacctgccacttgtcgaaggtcaggcaagggtgcgaggtgccgaacgagatgatgtcgccaatccgcaactcaacccccggcgccaccgtcatgaacgcatgctggtccatcaccgccgtaaccttgcagccactcacgtcatcgccttcggccggcacaatacccgccttgtagcgcttgagcggcaccggcagaccggcgtcgtaggccacgtcacgcttgcccagggcgatcaccgcaaagcccggctcgggcaacgattgcacatgcgcccagacttccagggccgggcgcaggccttcgttgaggtcactgcggcggtcgagcacgcagcattgcgcatctttatagatgccatggtcatgggccacgtagctgccggggcgcagcacactgaggaagcggccggcggcgttctgttgttcgaacgactcggcgatcaggtcgtaccaggccgaacccgacgcggtgacgatgggcttgggcaggtcgaaagagccgttgctctgcaaatccaccgccaggcgcaccaggctggcggcgaaatcgcggatgccgctgatggcatgctcgccgtggatcacgccctcatagccttcgataccggtgagagccagggccggctgggccttgatcgccttggccagctcgcgcacttcctgctcgctgcggcaaccgcaacggccgccgaccacgccgtactcgatcatcacattcaggcgcaggccacgggcggcgaagaacaggcccaggtcagcgacgttgtccgggtgatcgaccatgcagtggaagtcgaagtccttgtcggccagcaggtcagcgatcaacgccatgttcggcgcgcccaccagttggttggccatcaacacgcggcgcacgccaccggcatacgcggcgcgggtctgcacagcgttggccagagtgatgccccaggcgcccgccgcgatctggcgctggaacagcgccggcatcatgctggtcttgccatggggcgcgagctgcgcgccgctcttgctgacgaagtcctgcatccaacggatgttgtgttccagcgcgtcacggtgcagcaccagggccggcaggctgacgtcacggaccagatgggcaccgacagcggcggcgcctttttcaacggcattgatggcagacatgaaatgctcctattcgttgatgcgacgagccaggttgttggcgctttcgatcaacacccggcgatagtcgttgtaatttttgatcgcgtcggcgcgcggggcgacgatgcacaaagtcgcaatgctgatgccttgcgcgtcccgcaccggggcggcaaagcaatgggtaaaggtgtcggccacactgtcgaaggaaaagaagccatcgagggtggcctgacggatttgcgccaggaaggtatccagcggcaggcgctggccatccggcaggatgaagtcgtcgtggtcgatcaggtcgacgatctgctggtcgctcaagtgccccagcaacaggcgcccggaggcagtccaggggattggcgcgttttcgccgatatccgaagaaatgcggaaatgccgctcgccctcgcgcatcagcgccaccgtgtatttgcgcccgttgagcaggcacatctgcgcggtttcgcgggtctggctgacgatctcctgcaaggcgtgatcggcctcgcgggtcaagtcgaaatgacgcaggtgcgcctggcccaggaagtacagctggcggccgaggtagacgtgaccgtccttgcccaccgtttccaaaatacgacgttcaagcagcgacgcgaccaattcgtagacagtggatttggggctgccgatgccgctggcaatatcattcgggcgcaggggctggccgatttccttgaggaaatcgaggatatcgaatgcccggtccaggcctttggcgcggcgtttgatggtgtcttcggtcatggcagccttcgattcctgtaaaaatgctgtgatctgcgcagatccttgtgggagggggcttgccccgatagcggcgagccagtgacctgtgcttgtgctgacacaccttcatcgggggcaagccccctcccacattggattttccgtggtttcaagaatggggcatttagccctttttcttgtaggccacgcaatcgatctccaccttgcagtcgaccatcatgttcgcctgcacacaggcccgcgccggggcatgttccggggtgaagtattcgccgaagactttattgaaactccagaagtcccgcgggtcctccagccatacccccacgcgcaccacatctttcaattcgtagccagcctcttcgaggatcgccaccacgttgcgcatggtctgccgggtttgctcaatgatgccgccagtgatgatttcgccatccaccgcaggcacctggcccgagacgtacaaccaaccgtccgcttccacggcgcgggcgaaaggacggggttggccgccgccggcagtactgccggcaccataacgagtaatgctcataacaacaggctcctgattaaaaacgaatgttcttgagaaattccgccaggcgcggcgattgcgggcgttcgaagatgtccttcgaggtgccctgctcttcaatgcggccctggttcataaacacgatcttgtccgagacttcataggcaaagcgcatttcgtgggtgaccagcagcatggtcatgccctcttccgccaggcccttgatcacgctgaggacttcgcccaccagttccgggtcgagggccgaggtgacttcgtcgaacagcatcaggctggggttcatggcaatcgcgcgggcaatcgccacacgttgttgctggccaccggacaactggccgggaaagtggttacgacgctccagaagtcctacacgatccaaccatttttccgcgagcgccaccgcctcgtccttaggcattttcttaactttcaataagcccagggtgacgttttgcaacgccgtcaaatgcgggaacaggttgaactgctggaatgccatgccagtcatcgcccgatgctgggcaatcacgcgctcggggtgacgcacgcgcttgccgccgatgtcgcggtagccgatggactcgccgtccagggtgatctgcccgccctggaactcttccagcaggttgacgcagcgcaacagggtggtcttgcccgagccgctggagccgatcagggtcaccacgttgccgcgctgcatggacaggtcgacgcccttgagcacttccacctggccgtactgcttgcgcaggccactaatgttcagcaagggtgggttggtttgaggttggttcatggcaaggccacccgcttttcaatgtagcgcccgaataactcgatggcgtagttgatgacaaagaacataaagcctgcgaacaggtagaactccagggtcatgaaggtgcgtgcgatcacttgctgggtgctcaacagcaattcggccacgccgatcaccgacagcaaggtcgaggccttgacgatttccgtggaagaattgacccaggtcggcaggatctggcgcaacgcctggggcaacagcacgtagcccagggactgatagaacgtcaggccgatggccttgcccgcttccagttgcccacggggaatggcctgcagcgcgccgcgcacgatttccgaaacgtgggagccgcagaacagcgtcaacccgaccgcaccggcctggaacgcagtgatctgccaaccgagcgccggcagcatgtagaagcacgccaataccaacacaaacaccggcgtaccgcggatcaggtcgacgtacagccggaacggcgcccgcatccagaatttgccgtaggtcaggatcaacccggcgacgataccgatcagggtaccgaagataatcgccagcgcggacacataaacactggcttgaaagcccgcccagagggtatcccgggcgatccacaactcatgcaaccagctgggggattcgtacatggaaaccttccttaacgacggatcgccagacgctgctccaggtaacggagcagcatggcaatgaggtaacaggcggccacgtagagcgcggtcgtgaccaaccaggtttcgatcacccggtagctttcgacgttgatcttgcgggcgtaataggtcagctccggcaccgcgatggcggcggcgagcgaggtgtccttgaacagcgaaatgaagttgttcgacagcgcgggcagcacattgcgcagcatcaccggcacggtgatgtaggcgcggatacgccactcacccaggccgatggccagcccggcttcacgcaagcccttgggaatattcagcagcccggcgcggaacacttcggtcagataagccccggcgtacaacgacaaggtgatgatgaacgacgggatcttgtccaggcggatgcccaggctgggcaaggcgaagtagatcaacaggatcaacaccaggatcggcgtattgcggatcaccgtcacatacaccgaggccagcacgcgcagtgccttgtgtttcgacagcatggcaaatgccatcatcaagccgatcacgcagccaatcgcaatcgacagcagcgccagctcgaggcccaggccgagccccgccagcaagctggggaagtcgcgccacacggcggcaaagttcaactgatagttcatggtcagcagtacctgattggggcgccgtcagcgacgccccaggttttcgatttacttgaactcaaccgggaagccgatcgcaggttccggcaggtccacgccgaaccattgcttgaacgaggccttgtaggtcgggaactccacgccggtcatggcttcatgcagcgcggtgttgacgaagttcagccagtcctggtcgccacgcttgacggcgcatgcgtaggtctgtgggctccaagcgtacgtcgggctgcggtagcggcctgggttctgcaccatcaggtatttgaccgaagactggtcggtggcggcggcatcggcgcgaccagaattcacggcctggtacatcaggtcgacgctgtcgtactggtcgaccttggccttgggcagcgcctggtgcaccagttcttcggcgtagacgttttgcagcacggccacggtgacgctgtcgccggcggcctgcaggtcttcgatttccttgtacttgctgttgttcggcagcagcaggcccacgccttcgcggtagtacggcagggtgaaggccacctgctgcgcgcggctggcggtgacggtgatgaactggcaactcatgtcgaccttgtcggtgagcaggttggggatgcgcgcgtcagaggactgcaccacgaactcgaccttgctcgggtcgttgaacaaacccttggccacgatgcggccgatgtcgatatcaaacccctgcaacttgccatccgctccctggaagtgccacggcgcattggtactgcctgtacccacgatcaggtgcccacgcttgagcacatcatcgagcttgctgtccgccgcctgcactacgcttgcgagggaagccgatgcggcgaagagaaaaacacacgctttgaacacggaaggtcggtgatgcatgacaagcactccaggggttgtgtattccgctataccggaacttagtatgtaacaacggaatagacagcagaaagtgtgccacacgcggtaacggaaaaacacgacatgaataaatctgttttagatcaaatagataaaagatgattcgtgacaaggtgctaaccaacacttgaaatcactttgctacgcaaggccccacacagcggtgacaggccccactggcgtgcgacatagcggcgttaccgcgcaccgttgcagtgcgccggttgcgtggaaaaatccccacgctgggctagccttggcacattcattccaacaaggactccaccctgatgacgtttcgcctcaccctggttttgctgtcctttctggtggccggcaacgctctggccagtaacgaccgccgcgaatgcaaggcagagctgcgtaagctcaacgaagccttgagcaccaattacaccagccagaaccaccatggctaccgccaggcaaaggcctcaagggataacctggaatacaagaaatgcgcgagccaggcgcgtaaagcccgtgaacgcttggagcgtgacagggacctgtgaaggttgacagtagacgactgacgcctccggacttagcgtgagctaggtttctgactggagaacgtcaatgagctatttcaatgcggttatcgagaacaaagaagcttttgaacaagctctggatacaccgctcaccgtgtttgccctgttcgcctccgaaggctgtcacgcatgcaatgtgaccctgccgtggttcgtagaaatcaccaaagcgcaccagggaaaaatcaaggtattgatcctcgactgcgcgaatacgcccagacaccccaaggtcgtgcgtattccaacgctacttatctaccaacaaggtcagttgatgtcgacccttgaaggggttaccgagtcggctctgctccaggcactcgcagagtttgcttgatcaacctggcggttgcgcgacacgaccagcgtctacgcggctcaaagcagtctcagccatcagggtcagccatgttcaagaccattgaagcctaagtcctgaagaaacacccctcatccgccttgcaacttgagttcgcccagcatgatttcgagcgactcaagcccttatgcctgctgatctatatcgcgagcatctgcatctggctcgtgttcgacctgatcgtgagctttccgggcggccagggctttaccggggggccacttactggataatagctcaatgccttcattgagttaatgttcggcaccccctctaccgcctcgatggattttcttctgcgtatggacactcctctgcttccacaaaaacgcctcaatgctgcaatcaccaaagtaatggccggtatcagcgcaacgctgggcgccatgtgggcgctgatcacctatgtgtttcccgaccccagcgtgttcggctttggctttctcaactggaaaaacttgatactggtaatcagcgtattcctgttcctcgcggcagtgtctattggatggcaggcgcgtcgcctgccggacgcgataaaaggcacgctttcggtgatcctggccgtactgctcgccggcggttttttcattctgggtagcgagtacgccaaacccactttcgaatttgcccaatcacaaaagttgatgactgaaaatgacggcgccaacctgtttggcaagcgtatcgagctagtcgacggtgtacgcttcgaactgctggagtgtgagcagattggccaggcaccgagctgcctgctggaactcaccaacacccatgtcgaccgcgaaatgcgcgacctaaagcaaagtactctgtttgaaaaaaccggcggttctctggatgtcgagcaactgcttgttggccagtcaaagtctgaccagtggaacgcctttgcgttagtgcgcaatgtgccgacccgcgtaacgatggtgttccaacccgtgcgcgggaagctggagagcatcccggcactcaagatcaggtttcgcagcctcaagggcgaggataacgtggtcaagttcagtggcgtagcggttaactgaggggatggatatgagcaccgcaactgcaacagagaacgccgaccagccctgggaagctacgttgattctggcgtttcgcgatattcagtggatccttcactgcgaaaaacagcaggcactgatttcagtcgcgcttgcccagttcctcttggacaatcaatcactgctgtgtaatccctcggacccaacacagcaaaatacctgcaatgagaccaagggaaagctctaccgggcagtggaaaaaatggcggtaacgccgccactcctcgcgaaattggacggcaaggctgaaagtgcagcgggcgacgtgctaaccgcccatgaagaccggttcttcctgattgaattcaaatcggacatcagcaccagaagctccgaatacaccaaattcctggggattctgatgtggctgatcgatcccgacgccaaccacgtactgatcaagcggtcaaaaaaggggcatttttttgtcacacagcagcccgacgcatccgcaccctctaacccaaacctgcgcaagctcactatggaggcctacacttactacgacgctatcacccagcccgacttaaaaccgactgcggcgatccccgtgcatacgctcctggcggaaaaacgccacggcctgtcgctggctcacatggcggactaccttcaactgctctgcaaggcccatgtcggtgactcagcaggtggcgcgcacccgatgaaagtggcggtggcaagtgcatccgggatgttctggccgataaccgacctctcggagctgagtgcattggccggcttgttcaacacgaccgcagggccatcgcgcccaacacacccggcatttggcactgcaaacgccaaacacttgaaaggcatcgtcgatgccttccgaaaaaagacgccggcgcagcaaaaagccgcgctcagacgtgacggcagaacacccggcggcgccactccaggcctcaaaggaagctgagtggcaacacttgcacccccatcaggaacccacgcaccgaagcaggctgacctgcgtcacccggcggtcttccacagccgccacggtcaagcaccaaccctcatgctccaggctgtcacccaccaccggcaggcgatcgagcagactcatgaccaggccggccagggtctgatagtcatcggtggcgaccgcgttgaaaccggtacgctggcgcaccaggctgaggttcaaagcgccattggcgcggaacccatcaccctcctcgacgatgtcaggcccttcgatttcgctggcatccggcaactcaccggcgatggactcgagaatgtcggtcatgctcaacacgcccataaagtcaccgaattcgttgatcacgaacgcaatgtgggtggattcctgacgcatctgctccagcgcattgaggatcgagaaactctcgagcaaattgatcgcccgacgtgccaggtgctccaggttcggctcgttgccggccaggtattccttgagcaattccttcttgtgcacaaagcccagcggctcgtcgacggcgccgttgcggatcaacggcagtcgcgagtaggacgaatgcatcagtttcaggcggatactctcgggatcatccgccagatcgatgcagtcgaccttggcccgtggcgtcatcagcgtgcggatcggtcgctcggccagttgcagcacaccactgatcatcacgcgctcacgtcgatcaaacagcgggccttgagtggcatccggctcgccgagcaggtcagccacctcgtcacccacctcttccaacgccaggctgcgaccgccgagcaggcgcatcaccgcatgggcggtacgctcgcgcaccggcaacacgccttgcgccgacttcttgcggcgtgaacgggcgatctggttgaacacttcgatcaggatcgagaagccgatggccgcgtacaggtagcccttgggaatatggaaacccaggccttcggcagtcagggcgaaaccgatcatcatcaggaagcccaggcacaacatgatcaccgtcgggtgcgcgttgacgaagcgggtcagcggcttgctcgccacgatcatcaggccgatggacacgatcaccgcgatcatcatcaccgccagttcgtccaccatgcccacggcggtaatcaccgcatccagggagaacaccgcgtcgagcaccacgatctgcgccacgatcggccagaacatcgcataggccacattgcccgtgcgctgggccacatgcccttcgaggcgttcgtgcaattccatggtggccttgaacagcaggaacacaccaccaaacagcatgatcaagtcacggccggagaagctcttgtcgaacacctcgaacaacggctgggtaagggtcaccaaccaggaaatactcgccaacaggcccaggcgcatcagcaacgccagggacaggccgatcaaacgcgcacggtcacgctgctccggcggcaacttgtccgccaggatcgcgataaacaccaggttgtcgatgcccagcaccagttccagcacaatcaaggtcaacaggccgagccaggccgttggatccgctaaccattccatttatagagtctcttcaatcggttttcagaatgccggacacggcgaggcgcggtcggtggaccggtacagggctggcaatcggaatacggggtgcttcaacgggaacagcggcagcggatgtcttggggaaagacgactgggaggctccgagagggtgttcatgcaaatcctgcaattacaaaaggacttgaatcgtacagtcgaaaggcaaatttcccacaacccaaaactattacaagatctgtaaaacctttcacaccaattcgatcacttgatcaccaaatgaaattattatcactgcaaacacatcaaaacccatgccaaaaaccgacaaaaacagcctaaaaacctataagccagcctatttcgcagtttttcgtgaaagaatttgactgatcagaatttcatttgataaacatatgatcagtacaggcaatgaatgaacgactgactacaacaataaatggggtgctcatcatgaaacttgctacgaccttcgccgccgctgcggccctctccctcctcgccagcagcatcgccctggccgccgacggcaagacctacaaggtcggcgccgcggtctacggcctcaagggccaattcatgcagaactgggtacgcgaactcaaggagcaccccgccgttaaagacggcaccgtgcaattgaccgtattcgacggcaactacgacgcgctgacccagaacaaccagatcgaaaacatggtgacccagcactacgacgccatcctcttcgtgcccatcgacaccaaggccggcgttggcaccgtgaagcaggccatgagtaacgacgtggtggtcatcgcctccaatacgaaagttgccgatgccgccgtcccctacgtgggtaacgacgatgtggagggcggccgcctgcaggcccaggccatggtcgacaaactcaacggcaagggcaatgtggtgatcatccaggggccgatcggccagtcggcacagatcgaccgggaaaaaggcgagctggaagtgctgggcaagcacccggacatcaagatcatcgagaaaaagaccgccaactgggaccgcgcccaggccatggcactgaccgaagactggctgaacgcccaccctaaaggcatcaacggcgtcatcgcgcagaacgacgacatggccctcggcgcggtacaggccctgaaatcccacggcctgacctccaaggatgtgccggtcacctccatcgacggcatgccggatgccatccaggccgccaagaaagacgaagtcaccaccttcctgcaggacgcccaggcccagtcccagggtgcgctggacgttgccctgcgcgctttggccggcagcgactacaagccccgctcggtaatctgggaacgctacgccaaggatgtgaagtgggctgacggcaccgcgaagaactacatcctgccctgggtgccggtgaccaacgccaacgccgatgcgctgtacaagcaagtcagcggcgccaagtaagccgtcgccggttgatcgctccccgtatgggagcgatccgttcatctttgttgtgaggcctgccatgtccactgtcaccgaacgcccgcaagaacaactgcatcccgccatccccaaaaccatgcaggccgtggtctgccatggcccggaagactatcggctggaaaccgtcgacgtgcccacccccggccccgaggaaatcctcaccaaggtcgagttgtgcgggatctgcatgggcgacatcaagacctatcgcggcgcgccgtcgttctggggcgacgccgagcaaccgcgctatgtgaaaccgccgatgatccccggccatgaattcgtgtgccgcgtggtcgccctggggcctggcgcggaaaagcgcggtatgaagatcggcgaccgggtcatttccgagcagatcgtgccgtgctggggctgccgcttctgcaaccacggccagtactggatgtgccagaaacacgacctgtacggcttccagaataacgtgcagggcgccatggcccagtacatgatcttcaccaaggaaggcatcatccataaggtcccggattccatcgccccggatgaagcgatcctgatcgagcccctggcctgctcgctgcacgccgccgaacgcgccaatgtggactttgatgacgtggtagtggtcgccggtgccggcacgctgggcctgggcatcattggtgcggtgcgcatgcgcaacccaaagaaactcatcgtgctggacatgaagccggaacgcgccgccctcgccctgcgcatgggcgccgacgaggtgtggaacccggccgaagtcgacgtgctggcgaagatccgcgacatcaccgatggctacggctgcgacatctacatcgaagccaccggccatcacaaggcggtgaaccagggcctggcgatgctgcgcaagctggggcggttcgtcgagttcagcgtgttcaatgacgaggccacggtggactggtcaatcatcggcgaccgcaaggaactggatgtgctcggctcgcacctggggccttacatgtacccgcgcgccatcgactttatcggcaaccgcaagatcgacatgcgcgacgtggtcacccacaaattcgccctggcggacttcaaggaagcgtttgcggtgatggagcgcggcgacaagtccctcaaggttgtgcttgagccctgacctgctggatataccgcaccactgccggcgctttctcgaagcgccggtaaatcaacgacaaccaggacgacgcctcattgccctggatcgcgcggtacaccacccccggcaagctcacatgccccaccaccgacgtcggcaccaccgccacgccctgccccaatgacaccaacgcaacaaccgccaccaacccacccggctgcggccccaggcgcggcgcaaaaccaccttgggccgccacgtgcagcgtgccgctgatctgttccggcaggatgaaggtctcgttttgcagatgctcgcagtggatgaccttcaaacccagcagccatgaatcctgcggtaacgccagcacaaaaccgtcactgtccaggcacacggcttccacaccgtccggcaaggtcatcggcgaacggatgtagccgatgtcgtagcgcccgtccgcaacggcgcctggcagtgtggccatggcgcattcgcgcacgttcacgctgacatcgggaaacgcctggcagaacgcctgcatctgccgctgcaacacgccggaatacacggcagaagccacgtagcccaactccagatggccgatctcgccacgcccggcacgctgggcattgcgctgggcaaactcgaactgacgcaccgtcgcctccgcttcgatcagcagcgtggcgccggcctcggtcaggctgacttcgcgctgctggcggacaaacaggcgcgtgcccaggctggtttccatgtcctggatctgtcggctcaaagtggggggtgcgatccccaactgctcggcagcgcgggtgaagttgcgctgacgggcgacggccaggaagtagcgaaaatgacggatttccatttcagcattagctcaaaggtaatgaaatgagtcagcctggctaataaaggcgctgggcagcgcggatatgctgaggcaaaccagaacagtagagagcccttgcgatgtccgtcaactgcattccgcctattgcctttgaggtaattcaaccatgagccgggtcagcccacgcctgaccctgctgaccgcgtccggcgtctgctcgctgatcgtgctcgacaccaatatcgtcgccgtgaccctgccgagcattgcccgcgacctcggggcgaacttcgccgatatcgaatgggtggtcagtgcctacatgctggcgtttgccgcgttattgctaccggccggcagcattgccgaccggttcgggcgcaagaaaaccctgatctgggggctgagtattttcatcctggcgtcattgggttgcggggccgcgcccactgcgctgctcctcgatatcgcccgcgcggtcaaaggcgtgggcgcggcgctgttgctcacgtccgccctcgcctccatcggccataccttccacgacgaggtggagcgcgccaaggcctgggccttctggggcgcgtgcatgggcgtggcgatgactgccgccccgaccctcggcggcctgatcacccagtacctgggctggcgctggatcttctacctcaacttgccggtagggctggtgctgatgagcctggtcttgcgcgcgattccggaatcccgcgacacccaatccgcaaggctcgacccctggggcagcctggcattcagcgccagcctgctgtgcctgatctgggggctgatcgaagccaatcgcatcggctgggacaacccgttgacctacgcccgcctgatcggcggcgcggtcttgctgggcgtatttgtgctcgtcgaacgggtgcaacggcggcccatggtcgacctgcaactgttccgccacccgcgctttatcggggcgttgctgggaatgtttgcctatgccggctgtgcccaggtgatgatgacgttgttgccgttttacctgcagaacggcctggggttttccgcgatcgcctcgggcctgggcatgctgccgtttgcgctgaccatgctgatttgcccgcgcatcggcgcacgcctggccgcacgctttgcacccgcgacaatgatggccgccgggttgacgctggtgggcagcggtaacctcttgagtgcctgggcagtgaacgccggcggctacctgcccttcgccctggcgattgccgtcaccggcgccggtgccggcttgctcaatggcgatacgcagaaaaacatcatggcctgcgtgccacgggaccgcgcggggatggcgtcgggcatgagcacgaccatgcgcttcagcgcgatcatgctggcgattggggtgtatggggcgttgttgagcagtcatagcgagcagctgttgagcgccaccatcggcgcgcaatggcaggcgcaggtgaacgggattgcttcacgcgtagtggccggggatatgccggcggcgatgggcttgttgccggaatcggcacgggcggtgatacagccgctggcacggcaggcgtttgtgggtgggttcagcggggtgttatgggtgtcggggttgttggggttgcttggagcgttggtggtggggatgttgatgaggaaccccattccagcggtgcaacaggcctcaataaaacctgcgcaccgctgatcagccttaccagaaccgctgctgggtcaaccggctccaccaggtcagcagcacccggtccaccgagccgctggccgccaggcccacgcgctcctgcaggctcttgcgctcggcatagtgcaagtggaacacctcggcggtcttggccttggtggccaggtattcgtcgctggtttgcagctcatcgaccagttgcttgtcgagggctgcaacacccagccacacttctccggtggcgacgtcatcgattgccaactgcgggcgataacgcgacacgaagttcttgaacaactggtgagtgatgtccaggtcttcctggaacttctcgcggcccttctcggtgttttcgccaaacacggtgagcgtgcgcttgtactcgccggcggtcagcacttcgaagtcgatgtcgtgctttttcagcaggcggttgacgttaggcaactgcgccaccaccccaatggagccgaggatggcgaacggcgcgctgatgatcttctcgccgatgcacgccatcatgtagccgccgctggccgcgaccttgtcgatgcacacggtcaacggcacgcccgcctggcggatacgcgccagttgcgacgaggccaggccgtagctgtggaccatgccgccgccgctttcgaggcgcagcaccacttcgtctttcggggtagccaggctcagcaatgcagtgatttcgtggcgcaggctttcggtggccgaggccttgatgtcaccgtcgaagtccagcacgaacacccgtggcttggcctcggccttctgcttgcccttcttcttttcggccttgccttcggacttgcgcaaggccttgagctggtccttgtcgagcagggtcgactccaggcgctcacgcaggcctttgtagaaatcattgagcttgctgacctgcagctggccggcggatttgcgacgccctttactgcgcagcgccgcgaagctgatcaataccaccagaatagcgaccaccagggtgacggtcttcgccagaaagctcgcatattcggccaaaaaatccatgttgctccttacaagtgcagtgcgccgggcgcggattgccccagcataccggcggcaccgcgttcgagccagtgatcaaaccgccagcaacgacaggctccaacgagcttttaaaacaagcgtatgttttttcattgacagctcgcaggcatcctcataacctcgccagactttcaacgtaccgggaaaacggacgtgggcagcatctatctgattcgacatggccaggcctccttcggtgcagacgactatgacgtgctgtcgcccgtcggcgtggagcaggcacaagtgctcggtcgccacctggcggacatgggcctggtgttcgaccgctgcgtggccggcgacctgcgccgccagcagcacaccgccaccgccgccttcgagcagtaccacgccctcgacttgccggtgccggcgctggaaaccgacagcgcgttcaacgaattcgatgccgacgcgatcatccgcgccctgctccccgacctgctcaccaccgaacccgaagccctggagatcctgcgcaatgccgcgcagaaccgcagcgagttccagcgcatcttcgccctgatcatcgagcgctggctggccggcacctatgaccctccggggctcgaaagctggctgggcttcgtggaacgtgtgcaaggcggcctgcaacgcatccttgaagcggcggacaacacccagaagatcgcggtgttcacctccggcggcaccatcaccgccctgctccacctgatcacccggatgcccgccgcgcaggcgttcgaactgaactggcaaattgttaacacctcgctcaaccagctgaaattccgcgggcgcgaggtggcactggcttccttcaacagccatacccacttgcaactgttgaaggcgccgcagctcatcaccttccgatgaactgcggccaaccgtgaccccaaggtcactggactctacccaaaaggatcgaaaccatgactgacgtagccaaagctgtagaagcaatgaaagccaaattcaacccaagtgctgccgaaggcttggacctggtattcggtttccgtatcgatgacaccaagaacttctccctggtcgtcaaagacaagacctgtgaactgcaggaaggcgaaaacccggacgcccaggtgaccctggtcatggacagcgaaaccctggaaggtattgtcgacggctccaccgacggcatgcaggccttcatgggcggcaagctgcgcaccgaaggcgacatgatgctggccatgaagctgagcgagctgttcccttcctgattcacgggcgaccctgaatcccgatcccgccttcacaggcgggatttttatttgggctgcagcaacaacgccaccaacgcactccacccggtttgatgcgaagcccccagcccccgcccggtctcgccatgaaagtactcatggaacagcaccagctcacggttctgcgggtccgcctccaactgcgcatactccaccatcgacggccgcgagccgttttcatccctcaggaacaaccgcgtcaggcgctggctcaggctgtcggccacttcctccagggacgccagataaccgctgcccgccgggtactccaccgagaagttgtcagcgtagtagcggtgaaattcgcgcagcgactcgatcaacatgtagttcaccggcatccacaacggcccgcgccagttggagttgccaccgtacagccgcgagtcggattcacccggctggtaacgcgcactgagggtgttgccattcatcttcaacgccagcggttgctcggcgaatgccttggacaaggagcgcacaccaaacgtcgacaggaactcatgttcatcgagcatgcgccgcaacaggtctttggtccgctcaccgcgcagcagcgccagcaacaggcgattgccctgccccggttcgttccagcgtgaaaccagcttggccaggtccggccgatgtttcatgaaccccagcagacgctcgcgcaagccctccaggccctcatgttcgtgctgctccagtaccagcacggcaaacagcggcatcaggccaaccatcgaacgcaggcgcaccggctcgttctggccatcggggcggtgcagtacgtcgtagaagaacaggtcctgctcatcccacaggccttcggcgctgtcgtcgacacggttgatggcgccggcgatgtacaggaagtgctcgaagaacttcaccgagatgtcgacatacaccgcattgcgcttggccagctccaggccgatgcgcatcaggtccagcgcataggccgcgacccatgccgtaccgtcggcctgatccagctgataccccggcggcagtgcagcggagcggtcgaacaaggcgatattgtccagccccaggaaaccaccctggaacaggttgcgcccctcggcgtccttgcggttgacccaccaggaaaaattcagcagcagcttgtggaaaatccgctcgaggaaatccatatcgcctacgccgttgagcgccttgtcctgctgatacacccgccaactggcccaggcatgcaccggcgggttggcatcgtcaaaccgccattcgtaggccggcaattggccgttggggtgcatgaagcggtccttcaccagcagcaacagctgttgcttggcataccccggatcgatcagcgccatggccaccgcctggaagccctggtcccacgaggcataccacgggtattcccacgtgtcgggcatcgagagaatgtcgaagttggacaggtggcgccaatgggtattgcggatatgcaggcgctcggggggcggcgcgggttgtgcggggtcgccgtcgagccattggttgacgtcgaaatagtacagctgcttggaccacagcaacccggccagtgcctgacgctgcacattgcgcgcatcgtcgtcggccatgccacgttgcagggcggcgtagaagtcatccgcttcctggcggcgttgttcgaacagcttgcgcgcgttgacctgtggcgcgtcgacaggagcaaagcgcaggtagagacttttgctttccaggccggccagttcgacgatgaaacgcgccgcgactttggtgccgctgtcacgccgaattgccgattgaacaccctcgaccacgaaatcgttgatcccgtccttgaacggccccggtgcaggctgcccatccagcctggggtagttggtttcgttctcgcagaacagccactccagcccgtcctggccccaggcgctgagatgacggtccggcagttccggatggcgtgccagcacctgcgccccgtccaacaccagctgcggcttggtcgcgtcaaaggtccagctccagtcattgcgcgcccacagttgcggcaacacctgcagccgcgtcggctggtccgagcggttgtgcacggtgacgcgcatgaagatatcgtcgggttggtgcttggcgtattcgacgctgacatcgcagtagcggttgtcttcgaacacgccggtgtcgaggatctcgtactcggcatcggccaggccacgccgtgcgttttcgctgatcaggtcggcgtagggaaaggcgacatgggggtatttgtagagcatgcgcatgtaggcatggctcggtacgccgtcgacgaaaaagtacagttccttgacgtcttcaccgtgattgccctcggcgttgtcgaggccgaacaggcgctccttgaggatcgcgtcgcgctcgttccacagggccaggcccaggcaccagcgttgcgccttgtcgctgaaaccggccaggccatcctcgccccagcggtaggcgcggctgcgtgcatgttcatgggggaaataggcccaggcgtcgccgtcggcgctgtagtcttcgcgcaccgtgccccattggcgttcgctcagataggggccccactcgcgccaacgctcggcatcctgctgcgccaggcgctggccttcggttgtatcaagcattcgggtgtcgggtgtggccgtcatcgggtcctccatcgcctaccaggtgagaggcagtgtagagcccaatgacgcccgggtgcacatgaagacttagaagatggcgtaggtgtagttgaagatcaggcgggtctggtcctggtcggcagtaccggtgttcttgccgtgataggtgccggtacggaacgtggtaccgaagcctttcaggggacctgcctgcaccacgtagtccaggcggaagtcggcttcgttctctttctggtccgggccaccggcgaccttcgacttgatgtccgaaccgtccaggtaggccacggatgccttcagcccaggcacgtaggccttgaagtcataggtgtactggccaaagttgacctgctcgccggcacgggagaactggccgaccacggcgtcggtgaacagatagaagtcgctgccgccagcgccttgggcgtgcgggtcggcgaggctgccctggttgacccagacgaaaccgccatcgtcacccacgccaatgtggccgagcatcaagctgctgccgcccagttggtaggtgaaggccgcactgtaggttttgttgtcgacttcgccggcgtgtttggcgtagccaccgttgttgttgaattggtagccgctctcgccgttcttgccgtcgctgcggctgtcgaagtagcgcaggtcggtcttgaacgactggtcattgcccagcggcagggtatggaccaggccgacgtagttctgtttgtagaagtcttgcagttgggcgtagtagtactgcaacgtcaggtttttcgcgatcacgttgtcggaagacccaaacggcttgtagtccacgccgccgaacttgaagctgtcgctgtcgcgagtaccaccggccacgctcaggcctgtggagttgctggaggcacggccttcaacgcggttcagctcaccaccggtgaaggtgacgttgggaatgtcgttggaggtcaggatgccgccatcaaaggtctgcggtgctacgcggctgtcgttggacaccaggatcggcaggaccggcgccaggccaccaccgacgtgcaactcggtctgggaaatacggaacttcacattgccagcggcgcgcccgaaggaatcggccggttcagtgccgttgttcttggtcgggaagaaactattgccgttacccgccaggcccgcgcccgccgtgtggccgtcgccaccgtccaggcgcagcgcgccgaaggccatgacgtcaaaacccaggccaacggtgccctgggtaaaaccggatttgtagtcaaaccgcagcgctgtggcggtttcgcgcaaatcgttgttggtccccgagcggttgtccgcgctgtagtacatggtccgcgaactgacggacgcatggctgtcttcaaggaagccgctgtgaccgttgccagtgcccagcgagccgagcccgaaatcatcggcgtaagcctgttgtgcaagaacggcggcggtgatcgacaacgccagtgtagaaattttcattaacgacggcccctaaacatatttttatgtgtgcgatgtgcgtaacggcgttttcatccttgcaaacgtgacgattctttcacgccggccggggcggacttcgtgaagaattagttaggaaaatcgcccgaaaatgaaatttcacgcgggctgatttttgtcatcttcacgtcatctcattcatttgcagaatgaagtcctgaggaatcttcgtttgcaaggcgacgttgcgctcaacaaaatccagcaaaaggccaccatcctcgcccccgccatcaggaatttttctatgcccagcaccgcacaggtcagccccgacgagatccgcaagggcttttccaaggccatgtccgacatgtaccgagatgaagttccgttgtatggcgcgctgatggagctggtggccgaaaccaatgcccacgtgctcgacacccaaccgcaactggcgcaacagctgcaacgcaccggcgaaatccagcgcctggacagggaacgccacggcgcgatccgcctgggcaccgccaccgagctggccaccatccgccgcctgttcgcggtgatgggcatgcagccggtgggctactacgacctgaccccggccggcgtgcccgtgcactccaccgcgtttcgcgccgtgcatgaacaggcgctgcagaccagcccgtttcgcgtgttcacctcattgctgcgcccggagctgatcgaaaaccccgacctgcgcgccttcgccgagacggccctggccaagcgctcgatctttacccccggcgccctggcgctgattgaacaagccgaaaaacatggcggcctcaacgcccaggatgccgacgagttcatccgccaggccctggaaaccttccgctggcatcacaccgccaccgtcaccgccgcccagtaccagcaactgagcgaccagcaccgcctgatcgccgacgtggtcgccttcaaagggccgcacatcaaccacctgaccccgcgcaccctggacatcgaccaggtccaggccgccatgcccggcaaaggcatcacgcccaaggccgtgatcgaaggcccaccgcgccgccactgcccgatcctgctgcgccagaccagcttcaaggccctggatgaacccatcgccttcaccgacgcccaaggcagccacagcgcacgcttcggcgaaatcgaacaacgcggcgtggcgttgacgcccaaaggccgcgcgctctacgaccaactgctgaacgccgcccgtgacgcactcggcgccttccccaacgagggcaacgctgcgcgctatgtcgaattgatggaggaacacttccaggccttcccggacaaccacgcccaaatgcgtgaccagggcctggcctactaccgctacttccccacccagcaaggcttggcggcacgcggcagcgccgatcaaccacgcaccctggaggcactgatcgccgccggccacatcgacgtggaaccgttggtgtatgaagattttctgccggtaagcgcggcggggattttccagtcgaacctgggggatacggcgcagagtcactacgcagccaactcgaaccaggccgagttcgaacaggcactgggccagcgaacgattgatgaattgaaactgtatggcgagacgcagcagcgctccatcgatgaatgcaccgaggcgctgctggcatgaaatgaagtacccacccggctcaccagcgcaatccttgcgccgcaacagtccccagagccgggtgggcggtgggcatcataggcagtgagtgggatgatgtctttcagtcaattctgaaaaaatgtgaacggggcgaacgtgcctgttcactgcgcaataaaacaacgatgctgcagtaggttcccctgcgtgcggcagctatgaccaagccttcattttcctatctatgggcggcgtccagcggagaatcccgtattcccaggcagccttattcaatgcgtttctgcccctcacatagcttgtgattgccgtgtccgtgtacaagcaaccgatcttgatgaatgtgttgcccctgcactcattcgtcgtgagcgtgctgatagcactcatgatctatgaactggcgactcaaaaaaatagtcgcaaggtaacgtgtgtactctcaacctccagacgtaagcccaactgtgcttatcacgcgtgcaatacaaaaatacactgcaaagaacaacccacattaaacccaacagaaaaatactacacgcatttaggaagtcctacatttgctcaatgctggcaacatggcttttactgagtgccattcaggaacgatcagcctccttcccgcccccccaaaacagacactcaacaagcatgcttaaacctatcaaaaacaagaacgacaacttatattacgctttgtctgtcttcatgaatctggacgtccagagaagcttatttgtactttacctactgcaactcggcatcacccagggagaggtaggcattctacagtcgttcttgtttttttcttcagtcgcgctggaaatcccctctggtttactcgcagatcgatatggtcgcaagtgcacgcttatcatcagctttttaggcttgtgtataagtggaattggatttttgctattttcatcttttgttcccttcgcaatcatattctgcctattcggtgccagcattgccatggggtctggttcagacagagcattactgtatgacaacttactggcagaacatcgggctgatgagtaccctaaaatattgtcacgcgcccgtgctattggtgcgatatcgctgagtttgtccatgcttcttggcggtgtcatacaagacaccttgtcgtggaacggagtctatattttttttgcggcatcaaaactcatcggcgcgatcattgtagtattcaactccgaaatcaagcttccacctatttcactaaaccccaacaacgcaaatgaattaaatacgacaaccgcagagggaagctttactttactcatcaaatttttcagctccaacagaggtgcttttctgatacctctctttgttggatatgctctatttgaactctcaaccattcctcttttcatctacggccagccattcttctcccagcagggtctagaaatacctattattgccggcatttacgccacagttgaaatcatatcggctgccatgtttatggttgcaggatatatttgctccagattcacgcttggggtgatagccgtcaccaccaccctcattgtcaccgcactgctcttcaccctatctttgaataccggaacactctcttcagtcgcagtatttattttaatcatgtcactccccgctatctatgaaactgcctacgagacctacatcaatgaaaacatagagtcacgcattcgagcctcctgcctctccgtcgccaatctagtcaattcgatcatcatcggtatctcctacactgtcttcggcgggctgctggatagatatggtttctcgtcgacgttgattgttgttgcaggcgtctgttttatgggtctcttttttgcaagtactaccttactgataagtgggcaacaacgtcgtaaaaagagcaaaaagcttgaatcaatccggtttactgaagatgcgccgtgacaggcccaaagtcgggtggataaatatgtcgataaacctgtaggagcaagcttgctcgcgaagaacccgagaacgccgcgtccactcagggcgccggcgtcatcgttggcgtttttcgcgagcaagctcgctcctacaggaggctcggttgtgatcagcccaacttcgccacgatgtcgtctttgatcaacaagcgtttcttcttcagcttctccacatcctcatcgctggcacttgccgattccgctttcagcaccgccttgtcagcgtcgtcgtactgcgtgagcagcgagtccaggcgtttgtcgctcgccctgcgttcgtgaatgacttccttgctcaccttcaagtcctgatacaagtcgtgtttcactggcatggcgtacctccgcatgttgatcaatggcttacgccctagaagctagaccattgcgaggggtcttgtcatgcgcggggtcaatacagccccgttcgtcgcggcgcgggtgtttggatcaaacctttgcggcgtcctgccctccactctagatagccacccgagggagaccggtttcatgacgcacgctgccaccgctgtcgacacccaatgcatcaacacgatccgcaccctggccatggatgccgtgcagaaggccaattccggccatccgggcacgcccatgggcctggcgccggtgggttataccctgtggagtcgcttcctgcgttaccacccgcagcatccggactggcccaaccgtgaccgctttgtgctgtcggtggggcacgcatcgatgctgctgtattcgctattgcacctggccggtgtggtggagatcgatgccgatggcaagcgcaccggccaggccgccgtcagcctggacgatatccagcagtttcgccaagcgggctccaaaacccccggccaccccgaataccgcatgaccactggggtggagaccaccaccggcccgctgggtcagggttgcgccaacagcgtcggcatggcgatggctgagcgctggctggccaagcgcttcaatcgtgaaggaaacaccctgttcgattacaacgtctacaccctgtgcggcgacggcgacatgatggagggcatcagcagcgaagcggcgtcgatggccgggcatctgaagttgtcgaacctgtgctggatctacgacaacaacaccatcagcatcgaggggcacaccgagctggcgttcagcgaggacgtgatcaagcgcttccaggcctacggctggcacaccttgcacgtgaccgacgccaacgatttgcaggccctgggcacggcgctggaaaccttccacagcaacaccggcgcgccgaccctgattgtggtcgacagcgtgatcggctacggttcgccgcacaaacacaacaccgttgccgcccatggcgagccactgggcgacgaagaaatccgcttgaccaaggcggcctacggctggccgcaggactcgagtttcctggtgcccgacgaagcccgcaatgtgttgcgcgatgcactgctggaacgcagccaacccttgtacgacgcctggaaccagcgcctgtcgcagcttgagcaatacgaaccggaacgggctgacgaactgcgccggatgcgcgccggagaaatgcccgagcactggcaggacgatttgcccgacttcaaccccgacgccaagggcgtggccagccgcgccgccggaggtgaagtgctgaatgcctttgcccgacaaatcccctggctgctgggcggctcggccgacctgtcaccgtcgaccaagaccaacctcacctttgacggtgccgggcgtttcagtgccgacgactacagcgggcgcaacctgcacttcggcattcgtgaacatgccatgggcgccatcgccaatggcatggcgctctcctacctgcggccgtacacctcgaccttcctggtgttcagcgactacatgaagccgccgatccgcctggcggcaatcatggagctcccggtggtctttgtgtttacccatgactcgattggcgtgggtgaagatgggccgacccaccagccgatcgagcacctgacccagttgcgcgcaacgccggggctgctgaccttgcgccccggtgacgcgaatgaaacccgcgaactgtggaaggtggcgctggcacagacccatcggccgagctgcgtggtgctgtcgcgccaaccgctgccgacgctggatcgtacgcagtacgcgccggcatccggggccgccaggggcgcttacgtgctggcaagtgcgggtgcgccccaggtgattctgctggccacaggcagcgaagtcagcctggcggtggcggcgtacgagcagttgaaagaagaagggattgccgcgcaggtggtgtccatgcccagttgggagttgtttgaggaccaggaccagacgtaccgcgacagcgtgttgccgccggcggtgaaagctcgggtcgtcgtggagcaggcaggccccctcggctgggaccggtatgtggggcagaccggcgccaaggtggtgatgaacagctttggtgcgtcggcgccgttggcacagttgcaggagaggttcgggtttaccgtggagaatgtggtgaagcaggcgaaagcgcagatccaactgactcaacagtgatcgaaatgtgggaggggcggtgcgacggttccacttgcccccgatagcggtgtgtcagtcgcatatcagttgactgacacactgtcatcgggggcaagccccctcccacaagttctcatccgcttttagttcagttctttggccaggaatggcgcagtccggctagtcttgcttttggcaaccttctgcggcgtcccactggccaccaccttccctcccagatcccccgcccccggcccgatatcgatcacccagtcactctgcgccaccacgcgcatttcatgctccaccacgaccaccgtatgccccgcgtccaccagttggttcaactggctgagcaggcggtccacatcccgtggatgcagcccggtggtgggttcgtccagcacatacagggtggcgccccgcgcattgcgttgcagctcggtcgccagtttgatgcgctgtgcttcgccaccggacaactcggtcgccggttgccccaggcgcaggtagcccaggccgatatcccgcagcacctgcagcgaacgcaacaccccaggctgttcggcaaacacctccaccgcctgctccaccgtcagccccagcacctcggcgatgctcaagccttgccatttgatcgccagggtctcggggttgtagcgcgcgccgtggcagatcgggcatggcgcgtacacgctgggcatgaacagcaattcaacgctgacaaagccctcgccttcacaattcgggcaacggcccttggcgacgttgaaggagaactgcccggcatcgtagtgacgcttcttcgccgccggggtggccgcgaacagcttgcgcacgttgtcgaacagcccggtgtaggtcgccaggttggagcgcggggtgcggccgatgggtttctggtcgacctgcaccaggcggcggatgtgctccagcccggcgcggatgtggcccccgctggtttgcggggcgtcgtcttccaggcttggttcttcgtcgttttccatcacacgcccaaggccggcgcccaccagctccagcagtgcctggctgaccaggctggacttgcccgagccagaaatcccggtgaccgccgtgaagcagcccaatgggaaatccacgtcaaggcccttgagattattgcgcgtcacaccttccagttgcagccagccggtggcttcacggcgcacctgagtcgacacgcgcttttccgcgaacaggtactcacgggtctgcgacgccgccacctgcgccagccccgccggcgggccgctgtacagcacctgcccaccctgttcaccggccgccgggccgacgtcgatcagccagtcggcgcggcgcatggtttccaggtcatgctccaccacaaacaatgaattgccggccgccttcaagcggtcgagggcagtgaacaacgcttcgccgtccgccgggtgcaggcccgccgagggctcgtccagcacgtagatcacaccaaacaactgcgagcccaattgcgttgccaggcgcagtcgctgcaactcgccggaggacaaggtcggcgtgctgcgctccagggacaggtagcccaggcccaattcggtcaaggtactgacccgctccagcaagtcctgggcgatgcgctgcgcggccaggcgcttctccaccgacagcttcatcttgtcctgccccgccgccaccgggcgcagcaactcggccaactgcgtcaacgacagttgcgacaactcaccgatgtccaccccggcaaacttcaccgacagcgccgcctgggtcaggcgcttgccgtcgcacagcgggcaggcgctgccctgcatgaactgcgacacgcgctttttcatcagcgcactctgggtatgggtgaacgtgtgcaggatgtagcgccgtgcgccgatgaaggtgccctggtagctcggctccagtttgcgcttcaacgcatcgcgggtctgttccggggtgaagccggcgtacaccgggacggtgggggtctcttcggtaaacaggatccagtcgcgctgctttttcggcaggtcgcgccaggggatgtccacgtcatagcccagggtcaccaggatgtcgcgctggttctgcccctgccacgccaacggccaggacgccaccgcacgctggcgaatggtcagggaaggatcgggcaccatcagcgcctcggtcacttcatacacacgccccaggccatggcactgcgggcacgcgccctggggcaggttcggcgaaaagtcttcggcgtacagcatcgcctgccccttcggataactgccggcgcgggagtacagcatgcggatcaaactcgacaacgtggtcacgctgcccaccgacgagcgcgcactcggcgtgccgcgctgctgttgcagggccacggcgggcggcaggccttcgatgctgtccacgtccggcacgccgacctggtcgatcaaccgccgcgcatagggcgccaccgactcgaaatagcggcgctgggcctcggcatacaccgtggaaaacgccagggacgatttgccggaacccgacaccccggtgaacaccaccagggcatcgcggggaatatccacgtcgacgttgcgcaggttgtgttcgcgggcgccgcgcacgcggacaaagccggcgggttgggcagtgatcggaggaatattgcgctgtgaagtcatggacaaccttgtcgggcggtgagcacgctgcgcacccgttgcgtcagcgcttcggggctgtagggtttgctcagcagatgaatatcggggctcagcaagtgattgctggagagaatgtcacgggtgtggccggacgtgaacagcaccggcaccgcaggcgtctgctggcgggcccagtcggccaggtcggtgcttttgacgcggccgggcatgaccacatcggtgaagatcaggtccggtggcgagcctgcctgcagtttcgacatggcctggtcaccgtcttcggcggtaagtacggtgtagccggactgttcgagcagctccacgacagtcaggcgcacaccttcattgtcctcgaccaccaggatggtttcctgtccgccgctgtgctgcacctggtccatatgcacatcgaggctttccggttccaggctgtgggggaaatacatctgcaccaccgagcccttgccctcctcgctccacatttccacatgcccgccactctggcgcacaaagccgaacaccatgctcaggcccaggccggtgccatggccttcacgcttggtggtgaagaagggttcgaaggcgcgcttgagggtggtctcggacatgccgacgccggtatcggccacctccaggcgcacatactcgccgggcttgatgcttttgcccgcgcaatcgtccgggttgaggatgatgttttcgccggagatgcggatcaccccctcgcccttcatggcgtcgcgggcattgatcgccaggttgagcagcgcgttttccagctggttgcggtcgacgttgataaaccaggcatcctggggcatctgcacatcaatgtggatggtctcgcccagcgcccgttgcagcaactcgccaagcccggcgtaaatgcgttgcgggttatacaccgccggcgacagcggttgacgccgggcgaacgccagcagttgcgacgacagcttggccccacgctccaccgccgcaatggcggcggtgacacgccgctgcacctgggcgttgttcggttcctggcgggccagcaggtgcaggttgccggcgatcacttgcagcaggttattgaagtcgtgggccacgccgccggtgaggccgccgatggcttcgagtttctgcgactggcgcaactggtcctcggccgcagagcgcgcctgcacttcggcggccacccgttgttcgaggttgtgcgtgagttcccggcgtacttgttcggatttcaccagctcggtggtctccaccacaatcgccagcacgccggccggttgttgatcgtcgccggccaccgggctgtagtagaggtccagccacacggtttccggctggccgttgcgcaacagcaccaggtccttgttattgaatgacagggtgccgccggccaggcaggtgtccatcacatgccggttgaactcggccacttccggccaacccaactccaccggcgtgcccagcaggtacggatggcgcccgccggcaaatgccgagtagctgtcgttatagatcatgtacccccattgtccccagagcatcaccatgggcacgggtgaagccagcatcatctgcacggtacacgccaggctggtggaccagcggtcgatggggccaaggtcggtgctcgaccaatcgaatgcgcggatccgctgggccatttcaccggcccagccttcacagccgtgagggttggataagaattgcatggttggctctgtgcgcaaaaagagaacgtcggcaagttttggagcgctgtagacccggatgggttcaacccatctgcatcagaggtcattacagcagaaaccacgggggctcagtgaaaatcccgactgcgcacattgatcccttccagcaacggcgtcaggtcggtcaggcgcccggcgatcaagtgccgcacctcgcccaccgcttcccagcgcccgtccaccttcaatagccgcgaacccaccagggcctggcgttgacgctcggccaggtcgcgccagaccaccacattaaggttgccgaattcatcttccagggtgacaaaggtcaccccactggccgtgcccgggcgctgccgaccggttaccagccctgcaacgctgacattgcgtccatgttccaccgccatcagttcatgggagctgcggcagcggcgcttgcgcaattcatcccgcagcaacgccagggggtgcggcccaagggtcgtgcccacggtggcatagtcggcctgcaggtcctcgcccacgctcggtgccggcaactcgaccagcgcttcatccgggctcggcaggccggcaaacagccccagttgcttgtgcaccccggccaccgcccagcgcgccgtgtgccggttgtcggccagggcgcgcaaggccccggcatccgcgagcaaggcctgggcacgcgcatccagcccggcgcgctcgtcgaggtcggcaatgttgctgaacgctcgacgcaggcgcgcggcttcgatgcgccgcccatcttcttcgcgaaacccggagatcatgcgcaagcccatgcgaatcgccggttgtgcaccatcgatgggctccaggctgcaatcccaatcgctggcctgcacatccaccggccggatctgcaagcgatggcgccgtgcatcctgcaggatctggtccgggctgtagaagcccatgggccaactgttgatcagcgcacaggcaaacgccgccggttcatggcacttgagccagcaactggcgtaggtcagcaaggcgaaactggccgcgtgggactcggggaagccatagctgccaaagcctttgatctgctcgaagatctgcgcggcaaaggcttcggtgtaaccgtttttcagcatgccggtgcgcaggcgctgctggtgcggctccaggccgccgtggcgtttccaggcggccatggagcggcgcaactggtcggcctcgccggggctgtagtcggcggcgaccatggcgatctgcatcacttgctcttggaacagcggaatgcccagggtgcgttccagaacggttttaagctccggcgaaggataggtttcgggttcttccttgttccgccgccgcaggtacgggtgcaccatgccgccctggatcggccccggtcgcacgatggccacctcgatcaccaggtcatagaatttctgcggcctgagccttggcaacatcgacatctgcgcccgcgattcgatctggaacacgccgatggtgtcggccttgctgatcatcgcgtaggtggccgggtcttccttggggatcgtcgccaaggccaggtcgcggttgcggtggcggcgcagtaagtcgaagcaacgccggattgcactgagcatgcccaaggccaggatatccaccttgagcaagcccacggcgtcgaggtcgtccttgtcccactggatgatggtgcgctcggccatggcggcgttttccaccggcaccagggtgtccagcgggtattcggaaatcacgaagccgccagggtgctgggacaggtgccgagggaagccgatcaattgctgggtgagcgtgagcacccggcgcaacagcgggctgtcgggatcgaagccgccttcgcgcaggcgctccagcggcggggcatcgtcgctccaacgcccgcagcagtcggccagggcgttgatctggtccggcggcagcccgagggccttggccacatcgcgtaccgcgccggcggcgtggtaactgctgaccaccgccgtcagcgccgcgcgggtgcggccgtagcgctggaacacgtactgcagcacttcttcgcggcgctcatgttcgaagtccacgtcgatgtccggcggctcgttgcgctccctggacaggaagcgctcgaacaacaggctcgtcaggctcgggtcgatctcggtgatacccaaggcaaagcacaccgccgagttggccgccgaaccgcggccctggcacaggatcgaacggctgcgggcgaactgcacaatgtcatgcaccgtaaggaagtagctttcgtagcccagctcgctgatgagcttcagttcggtgttgatctgctgcaaggtcttggcgtcgacaccctgcggccagcgttgggcgatgcccgcttcggtcacggtgcgaagccaggattcggcgtcgtggccgctgggcaccagctcacgcgggtagtgatagcgcaactggctgaggtcgaaggtgcaacgccgggcaatcgcctgggtttcatcgagcaaggcgtgcgggtacagcgcggccagggcatcaaggctgcgcaggtgccgctcgccattggggtgcaggcgcgtgccggcttcggccaccggcacgtgatgacggatagcggtcatggtgtcttgcaaggcacggcggccacgcgcatgcatgtgcacatcgccacaggccaccgccgggatgtgcaggctggcggccaggctcaagcgttgttccaggtgacgcgcatcgtcctggccgcagtgcaggtgcacggccagccacaggcgcccggcgaaggtgcggcgcagccactggatcgaggcctgggtgtcgccgtcctcggcgacccacagtgccagcaggccgggcagcggttgttcgaagtcctcgcgcaacaggcgatagtggcccttttccgcgcgccgccgggccacggtgatcaagcggcacaggtgctggtagccgctgaggtcttccaccagcagcaccagcttcgggccgttctcgatgcgcacctcgctgccgataatcagcggcagttccaccgccttcgccgcctgccaagcccgcacgatgcccgccagggtgcattcgtcagtgatcgccagggcgctgtagccttggcgcttggcccgctcgaacagctccagcgcactcgacgcaccgcgctggaagctgaagttggacaggcagtgcagctcggcgtaattcatgcaaaccagccttgcagccacaacccatcgctttgcccgacgttacgaaaggcccagccttgctggccggcgcgggtctggatcaggtagtagtcgcggcggatatcggcgccgtcccaccagccggactcgatgcgctccggccccatgaggatgtgcacaccgtgctcggccaagagggtgggttcgctcagcaaccaaccggggcgttgcaccttgtgcaaggtcgggcatgggcttttatcggtcgctgtttgccaggcgcattcggggcggtggtcggcgtggaagcgcaagccctgcacggcctcatcgcccaggcgtgcacgcaggcgttcgcgcaactgttcccacggcaaggtctgttgcgggcggtcgtcgaacaggtcctggcgctgcggcacgaacaccggcaaatcctgggcgaccaggcgaaagccgcgtaccggtgaggtgacctgtacctgctccaggcgaccccgggccaattcaaacagcatcgccggttcacgctcggcgctgagcaggccgaccttgatcagcgtgtccggcgcctgggcgtgttccaggtgcaagtcaaaacgctgtacgccactgtcacggccacacaggaaggccgacagatcgcccgtcaggcgtcgcaaaggaaacagcagcgcctgatgggactgcacgtcgaaattcagctcgatgcgcacatcgaaccggtccggaggctgatagaacgccaaggccaatgggcgctggccggtcaacgcatccaagtgcttgagcaggccggcatcaaaacgtcgcgccaaggtgtgccgaggcagcgcctgcacctgggccaggcggcgcaggcccatgcgcgacaacgctgtggcggcctgcgggtcgaggccggcgcggtcgatgggcagcggcgccagggcctgcagcaagccgtcatcctgcaccgccaaaccatcgtagatattcgccagcacccgcgccgccgccgggttgggcgccgcgacgatacggtgacgaaagcccaattcggtcagctccttgcgcaagcgtgcttcaaaccgcggccacggcccgaacaagcccaggctcgattcgatttcaaacaacaaggcacgcgggtaatacaggctgacctgggaactgaactggtaggcccaggcagccaggaactgttggtggcgctcgatctcggcggggtcgtattcgacgctggcaaaggtcttggccagggcatgcgccgccgtcagggattggcccgggcgcaggcccagggcgtgggcggcgtcattgacggtttgcagcacacgccgctgtggcgtgccggccagcagggccaggggttgctccggctcgggatgcacacgcagcactccgtccagcgccaattgcgggaagacaatacacacccagcgcatgacaacctcagtgccccgccagggcaatcggcgccggatgggccaagccgccccggcacttgagcacccgtacctgcgcgggcctggcctcgacggccaggcgtagcgcggcgggcgatgagttgaccgactcactcaaggcgcgccaggcaaacgccagggtctgcccggtttccgccgccacttgcaggcgccgcagcgcccggtcatcggccttgcgcggccagcacagcaccgcgccgcaactgccggaacgcaggcattgctccaccgcccacagggcgtcgcgttcctcggcctggatcaccgagagcaggcgcaggtccactccagcgttctgccaggcatgggggtacggcgtgtacggcggcgccaccaacacaatgcgctcccccgccttcgacaaacgcgccagggtcggcagcaccagttgcaactcgcccacaccttccttggccatgaggatttcactcaatgccgcctccggccagccgcccgtgggcagcaccgcgtccaacgccgccagcccggtagggtgcacgctggacggcggcgcggcaggccggcccttccagacacgcccgccattaaacagcgtgtccagcgcaaccacggcgcccatcagccttgcctcaccaaaccgcagaacaccccttcgatggccaggtcctggtcaggccccaccacgatgggttgatacgcggggttgcgcggcagcagacgcacgctgtcgccactgcgctcgaaacgcttgatggtcacttcgccgtccaggcgcgccaccacgatctgcccgttcaaggcctcggcactgcggcgtacgccgaccagatcaccgtcgagaataccgtcctcaatcatcgaatcgccctgcacgcgcaacaggtagtccggggttttcgcgaaggtcgacgggtccagttgcaggcgactgtgcacttcagcatcggcgccgataggcaaacctgcggccacgcgaccgagcaccggcacatccagccattccgggcgcaccggctggttgagcaggcgaatgccacgcgcctggtgggggttgacctcgataaacccggcttcggtcagcgccagcacatgcttgcgcgccacgctgcgcgaggcaaaaccgaacgcctcggcgatctcggcgaggctcgggggctggccttgctgcgcgatgcggtcgcggataaaggtcaggatggcggtacggcggggggtgagagtcgtcatggagtacatttgtactcctgtgggaaatttctgacaatagccgctagtcgcgcgatagcggacaagcgttatcgaaccgtcccacataaccgccggataagctctactcccctgccctgcaaacgcccgcaaagtccgtcgcctgactacacagtgcgagggattgcagatggcgttatgggtttgggctccggtggatggggctgtttcatgatcgaagtgaccagccaaaccattggctatttggtactggccaccctggattcaaagacgcgagacgtcgaatccgttatcagcgacttcaagcgctgcctcaatcactacgacgcctgggcttcgagctttttcagcttttcggcgctggatatcgaacaggtcttcaaggtgggggatgaagtggcgctggtcgcgccgatcaaccgctccctgtttcccagcacaaccaccgcaacctgccgggcagacggcacgctgaccctggtgcatatgttccagagttctcgattcgtacccatcggcgatacgcccgtgatggtgcagcgcatcgatccggacggtggcccgctcggggagcccctccataaaaccatcggacccagcggcattctcgaaatcaaggaatgtgatcgcaaccagcagtaccgggtcagtttctaccccaacgtttccaaggcgcacttcaaggcgctgtacgcctcttaccagtcggttatcgaaccgctggaaggctggttgcgccgtgagtggaccaccaccttcgccgccttatggatgggttattccgaagccaactttctcaagcgctacctctcgctgcaccaagcctacgcacgcgggttcagcggggcgttgtattcactttgggacaacatcaagcagatgcttcagtggtttctggacccactgaagcatgccgaaaagctactgcattacctgagccaggaagaattcgaaaagctcttgaagcttggcaccgaaagcatcgcaaagggcctgctggtgctgagtgatgagccgttgctgttcatttatctgtcggcaatggtcagttggatgcggatgttaccgccgccctatatgaatgagctgctgggggaaatcagcgctgaagtattgatcaatttgctgctgtgccttgccacggccggtatggggatggcggtacgcatcagtacgaaggtgctgggcagcatcaagtctcaacgtgtgcgcacatggcttgagcacatggctgggcagttcgggaaatttcgtgcggatgatcacacgcaggtggccaagccgatattgctcagtagccaggcgacgacgatcaagacgattccggatgcgcccttgaaggctggggatcaggtggttgccaacgcggtgccggtggttcgggataaggccacgcagcggacggtgctggtgcggcaggagcctgtggatgatgtgccggcttctgctcgaaacccgaatggggatgcggcggcgcctgcggacaagaccgccactaacggctgcccggtgtcgatggtcaccggcgaggaattgctgacccttaccgatgggacgctggacgggatcttgccgtttgagtggactcgcttgtaccgcaccagtgcggtggaagtggattgcgggctggggtttggctggagtcactcgctggcgcatcggctggtggttgagggtgattcggtggtttggaccgatcatgagaatcggtcgaccaccctgcccttgcctactgcctctcgacctgcgatcaccaatagcctggccgaagcggcgatctatttgggtgctgcgcccgatgaactggtgctggcgcaggcgtcacgtttctaccacttccgcgacggtgtgctgacggcgatcagcgatgcgtatgacaaccggctgcgtatcactcgggattttctggggcgtgttgagcgggtggataacggcgtcgggcgctcgttgtggttgcgctatgtgtcggaccggattgtggcggtggattaccagattcatcgcgtcgtggatgacgggccgtttgtttgggtgacggagcagaccgttgtttcctacgcctatgacgacttgggacgactggtttcagcgaccaatgccgtcggtgaaagcgaggtttatcggtacgacgaacagcacatcattcttgagcgcggcttggccggtggggcgagctttttctgggaatgggaacggtctggcaagacggcgcggagtgtgcggcattgggcgagtttctcgcagatggacacgcgctatgcctgggatgacaacggccaggtcacggtgtttaacgccgatggcagccaggaagtctacgtgcatgaccagcgggcgcggctggtgcagcgggtcgatccagacggtgccgagcatttcaaatcctacgatgaccaaggccggctgaccgttgagcaggatccgctgggggcgatcaccgcgtatcagtacgacgaagccgggcgcttggtggcggtgtttccgggggacgatgagccgacgacctacgagcatgacaacgggttcgtacgggttgtgcggcgtggtaaagcggtttggaagtatgagcgcaatgaccagggcgatgtaacgcgcaagatcgatccagacggtcacgttaccgattacacctacaacaaatatggccaactgattggggtttggtacccggatcacagctgtcagcggctggtatggaacgagcacgggcagttgcttgaggagcagttgcccaatggtgggatcaagcgctatcgctatgacgatctcgggcggcagattgcacgggaagatgaacacggcgcactgacccagtatcagtgggacagcgtgggtcaactgattcgcgttgtgctgccaggcggcgagttcagggaatacagctacaacccctacggaaaaatcaccgccgagcgcgatgaactcgggcacgtcacccgctacgaatacgccgacggcctgcacctgatcagccgccgtatcaatgccgatggcagccaggtcaactaccgctacgacaacgcgcggttactgctgaccgagatcgaaaacgaggtgggcgagacctaccggctccagtaccacagcaacggcctgatccagcaggaaaccgggtttgacggtcagcgcaccgcttacgtttacgaccttaatggcaacctttcggaaaagaccgaacacggcgatgacggcagtcagttggttacccgctaccagcgcgattacgccggacgcctcgtcagaaaaaccctgcccgacggtggcaaggttgattacacctacgaccgccagggcaatctattaggcgtcgaagacggccactggtccctggcctacgagtacgacagccaaaaccgcctcaccgccgaacaccaaggctggggcacgctgcgctacgcctacgacgcctgcggccgattgcaaaacctgcgcctgccggacaacaaccgcctcaccctcaatcacgacaaaggcggccacctcgccaccgtcgaactgaacggcgttgtacttacctcacacctgttcaaggcaggccgcgaacagcaacgccaacaaggccaactgctcagccactaccaacacgaccaccaaggccgcctgttcaaccagagcatcgttgatgccgaaggcccggtctaccgccgtcactacgactacgacaaatccggcaacctcacccgcctgctcgacacccgcaaaggcgaacaccgctaccactacgacccactcaaccgcctcacccgcgccgaccactcgcaagacgaacaggaacgcttcggccacgacccggccggcaacctgctcatgcacaaccgccccggccccgacatcgtcgccggcaatcgcctgatgatccagggcgaccaccattactactacgacgccttcggcaacctgattcgcgaacgacgcggcaagggccatcaactcgtcaccgaataccgctacgactgtcagcatcgtctgatcggcgttaagacgcccaacggccagactgccagctaccgctacgacccgtttgggcggcgtatcagtaaaaccgtagatgggattacgaccgaactcttctggcaaggcgacaaactcattgccgaacaccacgccaatcggcaccgcagctacctctacgaaccggacagcttccgcccgctagccttgctggaaggtttcggccccaaggaaacccaggcctaccactaccaacttgaccacctgggcaccccacaggaactcaccgcccaggatggcgaaatcgtctggtccgcgcactatcgcgcctacggcgaaatcagccgcctcgacatcggaaaagtcgacaatccgctgcgtttccagggtcagtatttcgatcaggaaagcggactgcactacaaccgccatcgctactacaatccggatgttgggcgttacctgacgcctgatccggtgaagctggctggcggaattaacacgtacctgtacgtgcctaatcctacggggtgggttgatccgttagggttagcctgcaaatcaacgaactgcccccaactgatcaacgctcaaaaatgggaattgaaacctgctgttgatctggactggcgtaatcaaaacggtagtgcctatgagcaaatgcatattggtttagatgaagcttttcgcaggacagatatacctaaggatgaatacagcgtcacgaagtggggtaaagaccaatatggaaaatcttttccaaccgaatggagggttgaaaatggaccaaaaaaaggagcggaagtcaacatagatgaccctacacttgtttttagcaagaaaggtccacaatcaccacatattggctaccaaactccaggcaaaagaaccggtggaggagcagtaagaggacatatattgctcaacctgctcccagttagccgttcaaaaataggggaaaactgatgaattatctagaagcagaaatagacgaagtgctcagcacacttagtattaaacataaaaaacttacaacagaagagattagctcattaatcaaagcattaactagacgttttttcacaactgaaaaatccacacttgaccctatggacttcaatgagacaaatgccgagtacaactcgaatttctggaaagaaataacgagacacataaagaaaacagatctaacactaatcgtttacgatacaaactatagagcatggcaaataaataccccacaggacattgaacttcttataggtgaaacaactggctatccattctggctaaccgatcgcgccctaacatttttgatccacttggacgaccatgactgtgtaagctcagcagaaaaagaatgacaagtactcagcaacagaaacaccgccaccgaccgctaaaacttcggacattaggcccccactcgagaaacacacacccaagcaaaattaaataaattaattttccgaaaaagaaacacctgaaatacttatagaatcaaaccccacttttagttctaggtaaaaagggcaattactatactgaaatccttgcaatgatatgaactactaccccccaatccaggcgaagaaggttttcaggtaaatcggctacggctacgacgcctgcggccagctgcaaaacctgcgcctgccagacaacaaccgcctcatcttcaatcacgacaaaggccacgccctcgtcaccgaataccgctacgactgtcagcatcgtctgatcggcattaaaacgcccaacggccagaccgccagctacctctacgacccgtttgggcggcgtatcagcaaaaccgttgatgggattacgaccgagttcttctggcaaggcgacaaactcatcgctgaacaccacgcggatcggcaccgcagctatctctacgaaccggaaagcttccgtccgctggcgctgctggaaggttttggtccaaaggaaaccaaggcctaccactaccaactcgaccacctcggcaccccgcaggaactcactgcccaagacggcgaaatcgtctggtcggcgcattaccgtgcctacggagaaatcagccgagtcgacatcggaaaagtcgacaacccgctgcgttttcagggtcagtatttcgatcaggaaagcgggctgcattacaaccgccatcgctactacaatccggatgttgggcgttacctgacgcctgatccggtgaagctggcgggtgggatcaatgcgtacttgtacactaccaatcctacgggctgggtagacccaataggatttgcctgcgcgcgcggtaattgtccgggacaaagaagcaaattaaaaaaaccacacgagaaagcgccccctgaaataggagatgtggttcactctgtcacttatgaacaggctttaaacaaagctctagtgtggttattagaaaataatttccgggcagaaataccaaagccaggaaaatttggaaaaagaaaaggggatcccataggaatgcaaacatccgatagacaaactggctatcgtgttgaatacgaccaaaatagtggcgcacatatcaatgtatggacccataaaaaaaacggcccacattttacatttgaaggagacgaaaaattggtgatccagctaattaaaaggtttgcaaagaaatgagctatcttgacgatgaaatcattgacgacttcaaaaaaatcaacataaaaatcaccatcctaacaaaagtcaaacatgacctcatggtagaaaacatcagtcaaaacatcccattctccgtaacaaatatcgcatggaacttattgaaagatagtatctatctgggtgtagcaacatcacaaacgtcaatggatgcacttgcagaaaaaatcacacacaccacaaaagcggacatcattattataggcgacgccaccgatgaggcttattcaataggtatcaagcagctctccccagcattgagaatattttcgacgattccgcagcatacatacataactcaagaaagcttagattggatagcaggcatatcttttgaaggctatatatatttttgcaaactccaaccccccaaaaacacaatccgacatcaagaaaaaaccgagtaaaaataaatgttccaaaacacatgctagaaaaaactgaaatccaaggattgctgcgtttacctatcgaatatatacatcgattttgattgcgggcctgatgatagggtcgacggttttgacctctggcggttatatgtttacacatgttagctgccgcaaaaatacaaaaagtacaccgacaaagaatacctggcgcatgaattcgatgaatatttgaaactgggcaaagccaagaaaatcccaagctccatgtccagtctgtacttcattcagcaatgaacatgactgcccagcctgatgagcaatcaggccctcacccccacgccaccagcaacaaccccagccccaacaccaaacacaacggcgaataaaaatacgtataccacctcgagaaccccgctgcgcttccagggccagtatttcgatcaggaaagcgggctgcattacaaccgccatcgttactacaatccggatgttaggcgttacctgacgccggacccggtgaagctggcgggtgggatcaatgcgtactagtgcgcgcccaacccggaattattgagcgctacacatcgggcccaaacacaggggaacctaaatacccacccgctgcaacacattatctcgtatgcgatccataaaccccacctgcccaacagcaggttaacggtttaccgtggcatctctggcgagcagttccatggcagcagtgcttcgtagtcctctactgccgaggcatgcggcagcctctccagtacgtggcgcagccacgtatagggctcctggccgttgaccttggcggtctcgaccagactatagatctttgcgctggcagtggcgccgttgacggtatcgctgaacagccaggccttgcgcccgatgacaaacggcttgatcgctctttcggccgcgttgttgtcgatgggcagataacccgcttcgacatagcgttccagtcggctccagttattcgccaggtaatgcaccgctttgcctaatgcactttgtgccatcacctgcggctgggttttatccagccaggcttttaactggcccagaatcggcaggctcttttcctggcgaccgataaaccgctgctcatcactcgcgtctttgagttcacgctcgatcccgtacagcttgttgaccattgccagcgcgatatcggcccgtccggttttacccttgggctgcactttttgcgcatccacgaacttgcgtcgcgcatgagccatgcaggccagccgttccacgcccggttgcaaggccaaggcgttatagccggcgtaatcatcggtcatgacataaccacgataactttccagcaggcgcagcggcacgtcctgcgcacggctggaggtgtagtcgaacagtacgactttacgatcaggcgggccgctggcttgcacccacatccaagattggctggtcgggtctcgatccggttctttcaacacctggacgcgggtttcatcacagtggatcaccgggctttccagtaatcggtcgcgcatcaaattaagcagtgactggaagtgctcgctgcactggatcacccagcgggccagcgtttgccgaggaatttcgatgccgtgtcggctcagcacgctttcgaaacggtgcagtggtaaaccgtcgacatatttcgtggtcagcagcatggccaatacgcttgggctggccatgctcttttcgatcagttgtgcgggtttgtcagccgtgacaggggctgcttcgcagccccggcaaccgtagaccttgcggatatgtttgatgacccggatctgcatcggcacgatatccagctgctcgctggtttcttcgctgatcacatgcttgcggcaaccgcaggcacaggtctgttcgtgttcgggtagttcgtggatcacttcgatacgcggcagatcggccgacaatggcttacgtttgccacggcggggtgtcggctcaacgacctcttcatcagcgtcgcccactaacgacatgggttcgctttcaggttcgttgaacaaagccagttgcggcgtattgggctcaacggtttgctcggacttgcgcccaaacagacggtcacgcaacagcttgatctgttctttaaggtcgacgatgtgggtctgataagcctgagctgtttcgtcctggcgattgagtgcctcaagcagcaattgcttgagcaaaacaggatcatctggaaggtcgtcgggcaaagaaatcatggcccggattataccgggtcacgccacgtagcgcggcgtcaaaacctgatgagggcggttgcgccagaggtcaaaaccgtcgagcagccagttcagctcctggacgctgaggataatcgctacgtccgtgtcatcgggggatgttttgaaacgctcggattccaggcgcttgagccaaagacagaagccgttgcgttcccaatacaatatcttgacccggtttcgggatttgttgagaaagacgaaaagcaccggatcgaagaccgccacttttatatccagttcgaccaatgccgcgagaccgtcgatggattttcggaagtcgacgggcttggggtagaggtacactttttcgactttggcgtcgggacgcatcatggcgaatgggctcctgaaagaaatcgggagcacagcatccgggatcacgtggcgggtttgaatgtggggttcatggagcggttacattatctcagccatagagatcagttaaactcgatataccgagcccagcttatttttagacgaaacggacacacttcatcattagaaccaatgaatatgggaaaatttgttggcgaaggatactcaagagaaggaatagaatatagccaacaacgtaaagcaagggtgatattaaacaaccaaggccacccaaaaactgcatacacggagaaatgactaaaatgaaaaataagcctagcatgtcaataatccgtggactactgttcacttacgacattgaaaacactgacgacttagagcgagaagaactaattgcatcaaaagacgtaaataatgaaaaagaactttccgatctttttgacgagttaaccaaaccagaatttctcgattatacgaggagtgagcaggagtggttcattgcctcgatcacacatttcttagccatcaatgacaattttgatgcgattttcaaaagcatggcaacctatttcagcgcacccgtaattaatcagaggaagtttatgcaggtcttattgagatgtttaaaaaactactacgactcgccaagatcggagaattaagaaaacaagcgcatctggcttctgcctgggtaggtatcgaagaattctaataagccagcctcgaagactggtcaacctggtaacccaaacaccgccctccaaggcaacaccgcccctctgtggcgagcaggcttgccctgcgttgggccgcgaagcggcccgagtccaggcgatgggtgttttcaggtaacccggcattgtctgttttggggctgctgcgcagcccaacgcagggcaagcctgctcaccacaggaaggctgcgaaccacaacaagcgggttcacccaaacaaagggggctcaccaaccttccttgagcatgcgcaactcaagatgctgcaacaacatgatggtcttcccatccacaatctcgccgttctgaaccattgccaaagcctcttcaaagcccagctccagcacttcgatatcttcgccctcctcttccaagccaccgccagtcccaacccgatcacccggctgatattcacccatgaaaaagtgaatccgctcggtcaccgagccggggctcatgaacgctgcgtagattttctcgacatggccgacgcgatagccagtctcttcctcggcctccaggcgaatgcgttcttcgggactggcgttatccagcaacccggccgccgcttcgatgaggtagccatggtaatcgttgacgaacgtcggcatgcgaaactggcgaatcagcaacaccgtacgctgcacgcggttgtacagcaggatggtcgcgccattgccccggtcgtacacctcgcgggtttgggcttgccagctgccgtcgcggcggcgcaggtcgaagctgtattttttcagcaggtaccagtttttcgaaagggtctcttcagcggtgatgcgcacggggctatcagccatggtcgttttctcaagaaagggaatgtgtctgtttgatgcgatcccaggcagcggcgacttcttctgcgctgctggccttgatccgcgccagattacgcggatattcaaccccggggttttccgtaaaccgcgtggcggtgaattggccgttgctcgcgcgcaggatgtagccggtgtcttcacactgcgccgacgccaggtacaccccccctggcgtcacccactccggcttgagttcatccggctcgtcagtcacgccccacatgcgcgtcttcgccaccggcgagattgcattgactttgacgcccgcctccagcccctcatggctcaacgcattcatgatccccagttgggccatcttgccggcgctgtaggccaccaggccggtttgctcgtactgcgcgtacatggcgcggtcggaggtggtgaggatgatgcgcggcgcgggtgaacgcagcaggtgcggccaggcgtgcttgcacagccacagcggggcgtagaggttgatgtccatggcacgctgcaggaacgtggcgtcgaggtcggtgatgttctggtaacccacccagccggcattgtgaatcaggatatcgagttggccaaagacctcgagggtgtacgcaaccaactgccggcagccctcgttcgtggacaagtcgccgccgtgaccgatcacgtgcaagccttcggcctgcaacgcctttgccgccgcctggacgaccgttgcatcgctgcctgcgcccgcgctgtcggcgccgatatcgctgatcaccacccgtgcaccgccctgggccagggcccgtgcgtaacagagccccaacccgcgtgcgccgccggtgacgattgcagtcttgcctgtgaaatccatgtgcttgctctcctgttcggcggcccaccctaacaatctctgcacgtattgttcaatgcagtaacactttgtaagaaacacccatgggcggctgtcgaattaatacctgcctgggcaagccatctggtaaaacccctgcttgaccttttacctggaaccttcatgtcctcacgttttctctcgcgcctgagcctgcgctggtttcccctggtgtgcatggcgctgttgatcgtcggcctgccggtgggctgtgccgtgctgcaacacaaggaacgcgaactggtgtttcgcatcgagccgggcaccgccagttggtacagcggcttgcccaaggcggtgcaggaattcgagctcaagccggccagcttcaaatcggggcagaatatccatggctggtggtacccggcggacaagaaagatgctcccgcgatcctctacctgcacggcgtgcgctggaacctcaccgggcagctgtttcgcatcgagcaactgcacgccctgggttattcggtgctggccatcgactatcgcggtttcggccagagccacggcgagctgccgtcggaaaccaccgtgtacgaagacgcacgcatcgcctgggaacgcttccaggtgctgcaacccgacccacagaaacgcctgatctacgggcactcgctggggggcgcggtggccatcgacctggctgccgaattgggcaaacagacaccgttgccggtgcgtgggctggtgatcgaatccacctttacgtcgctggcggatgtagccaccgccgtggcgaacacctcactgccggtgcgttggttgctgtcgcagaagttcgattccatcgacaagatcgccgacatccatatgccgctgctggtggtgcatggccttgacgaccgctatgtaccaccgcgtttcagccagcagttgtttgaagccgcccgggagcccaaacggctgttactggtgcccggtgccagccacaacaacagcatgagcctggccggtcgcagctatggccaggcgctggacaaattgatgcaagcgaagatgccggcgcaggttgtcacccactccacaggccgcaacggcgactcgtaaaaacgtttttcggcactgggttagcgcttgcctgtcaagcgcaaacccagcccatgctgggccaaatccgaagttgatcaaatattgatcttggcttaaatcgccaaccctgccggggcttcgcaaagttatccacagagatacccacggttttcgtggacaactctttttatttttttacgttttttttgctcagaaaaggttttccgggaatgtccccggcaacaaaatctcgcgattcacatcgcgtatatcgttatacccacacagcgccatcgtcacgtccaactcacgggcaatgatctcgagcgccttggtcacacccgcctcgcccatcgcccccagcccatacaaatgcggccggccgatcatcgtacctttggcacccaacgccactgccttgagcacgtcctggccggagcgaatgccgccgtcgagccacacctcgatacgctcccccaccgcctccacaatcgccggcaactggctgatgctcgacggggcgccatccaattgccgtcctccgtgattgctcaccaccaacgcatcggcgccggcattcgcggccaggcgtgcatcctccacatcgaggatgcccttgatgatcagcttgccaccccagcacttcttgatccactccacatcatcccaactcagacgcgggtcgaattgctgggcggtccaggacgacagcgaactcatgtcggccacgccttttacatgcccgacgatattgccgaagccgcgccgtttagtgcccagcatgcccatcacccaacgcggtttggtggccatgttgagaatattcggcaacgtcagtttgggcggcgctgacaggccgttgatcaagtccttgtggcgttgcccgaggatctgcaggtcgagggtcagcactaatgcatccacgccggcggccttggcgcgctcgatcaattgctcgataaaggcgcggtcgcgcatcacgtacagctggaaccagaacggctggccgacgtgctcggcgatgtcttccagcgaacaaatgctcatggtcgacaaggtatagcgcaggccaaaggctgcggcggcgcgagcggtgagaatctcgccatcggcatgctgcatgccggccaaaccggtcggtgccagcgcgacgggcatggccatatcctggccgatcatgctggcgcggatcgagcgctcgtcgatattgcgcgccacccgctggcggaacttgatgcgggcaaagtcgctttcattggcgcggtaggtgctctcagtccaggagccggaatcggcgtagtcgtagaacatgcggggcacacgtttttgcgcgagcttgcgtaaatcttcgatggttgtgatcaacgacatctaggtcacctctccctggactgaacgctgagagtaaccgcccatcgcgcgcacaaccagccattgcgtttatagcccagggcaattaatctcgcacaaacccgcaaaaagacgcaaaaccatgcacaacacgcatcaagccatcgacctgccttccttgcgcaaacagaagattttgttgctgctggagcgcgacggcaaagtcaccgcctcggagttggtggagcacttcgccgtgtcccaggacaccattcgccgcgacctcggcgaactcgccgccgccggcctgctgcaacgcgtgcacggcggtgccttgccccgacccaaagacaccggcaaggattttttcacccgagtgggcgaaaccaacgacgccaagcgccacctcgcgcgcctggccgccgagcgggtcgaggacggccagatcgtgctgttcgattccggctccaccaccctgcagatcgcccagtcattgccgcactcgatccgcctcacggtagtcaccacatcgcccatgatcgccatcgctctggccgaccatcccgacgttaaagtgatccttaccggcggccaactcaacccggccacgctgtccaccagcggtcatgaaaccgtgcggctgatccagagcgtcaaggccgacctgctgtttaccggcgtgtgcgcgctgcatccgcaagtcggcatcagttcgctgcattttgatgaagtggcggtcaagcaagccctgctcgacagtgcgtcccacgtggtggcggtgaccatggccgacaagctcggcgccgtggagccgtttgtggtggcgccgtgcagtcgtattcacacgctgatcaccgaatggcacgtgccgagtgtggaggcgtatgaacagctagggttggaagtgctgcgggtagaggtcgagtaggcacagtcagaacagcacctcggacgcatcgcgcatgaaaatctcgatggtcttggggcctacaccgtcgaattccccaaggcgtttttcgaaggcctcacggctttcgctgacactgcgcatatgggtgatcttgccggcgtattcggcgttcaacctggcgctgaggtcgagcaagcgttgcgcggtggtttcgtcatagcgcacgtaatgtgcgcgtccaagcatggccaccaattcacgcgatgtgcagtgctgcagcttgcgcgcagtgtcacggcctgcctcctcgacaatcactttataggcctgcgcggcaatcggtgcctggatacgcttgcccatcaggaagctggcgataaaccacttgaacagagcgtggtcatcgccgggcttgaggtcgatgcccaactccgtcgcgctgatggcacgggccatgctcagtggcccagcttgcgctcggccttggcggcctgttcgttgatggcatcggtctggcgttcgatgtcctttatcgaggtgggcgtcaccactttatcgatggtttcggtcttgggattcgggcggtccagggtttggcccttgacgggtttttccgtgccgctctgggcttcttcagagctgatgggtgcaggggttttatcggcagtcatggtgtatctccagtcaattgaaagcccgtgaaaacgccgggcgcttaagcagcagaggcttgccggtgtggatagttcaaggaaattgcccgcgccaaccgtccgagaaataagcgcaaattaatttaaacctttgccgtgcgagccggatcaactctcccagatcccattccccatcaggagacactcgatcatgagttcacacctaaacggcaagaagattctggtcatcacctccaataccggcatcgagcgcgacgagctgctcaaaccgttggaagcactgcgcggttatggcgcgacggtgacccacgcctccagcaagggcggcaccacacagacttttgtcggcgacaccgagaaagaccagacggtggaatccgacgcaaaactgtccgagctcagcgctgctgatttcgatgcactggtcattcccggtggcaccgtcaatgcggacacgttgcgccaggatgcggccgcgttgaagctgatcaacgcgttcgtgcaggccggtaaaaccgtggccgcgatctgtcacgggccatgggcgctgattgatgcaggcgtaatcaagggcaagaccctgacctcctacaagagcgtgcgcatcgacctggaaaacgccggtgccgccggctgggtcgatgccgacgtcaaggagtgcaaggctaacggctggacgctgattacctcgcgtacaccggacgatctgccggcgttcaatgaggcgattgccaaggctttggcaggctgacacccaagggctgaacgaaaacaggcgcctcgaaggcgcctgtttttttatgggctgatgcctcagcttttacgatgctccggcatttcccgtttcggcccgaacatcgcccaggcgatcagcccgaacagcggtacaaaaatcagcaccaccagccacaatcctttcgactcccagccccccgtgctgcgcaacacgatattgatcgcccacaattccagcagcagcagaatcactgccagaccaatccagatatattgaatttccatgcttcacctcctaggtcatatgccttaggtcaagcaggggccgcgagggttcattaaaattttcgcgatggctcatccgcaacgggtggctcgggtgtaagcccccagtcgccgtgttcataccagtcatcaccgagcatctcggccgggtgcatggtgcggtcggcaccattgccgcaggcgaggtcggaggcgccgcaatagcggtcacacccccagcagatgcgttcagggtgtttgggatgcagcggaaatggcttggccatgaagcagtttcctaccggcgaactgtgggtcaagcctaacgccacgatcccaacccagccttgacccggatcaagccgggcaatcatgaaatatcctgcaaacttgacaagaatcattattattcacgccagaccttcctagactcgggctctctcccctcacccgtcaggaagccctcatgcgtacctcatccctgctgcccatcctcctgttgatgaccacctgcgcagcgtccgcgaaagagtatccaatcggcgaaccgcaacactgcccggggctggaaatcggcgcggtgtacctgcaaccgatcgagatggcccccgccggcatgatgcgcgccaccgccgattccgacgtgcacctggaagccgacgtgcgggccaccgcagacaacgcgcagggttttcaggaaggcagtttcgtgccttacctgaacctgtccttctcgctgaaaaaacaaggcgacacgccgcccatcaacggtgacttccacgccatggtcgccaatgacggcccgcactatggcgacaacgtcaagctgcaagggccgggaaaatacagcctcaccttcaccgttaccccgcctttcggccaccattccctgggccgtcataccgacaaggaaaccggggtcgcgccttggttcgaacgctgtgaagtgcactacgaattcgtctacgccggcatcggcaagaaaggtggttattgatgcgccgcgccctgctgctcggcgggtgtgtgctgaacggcgcagccttggcggcaccgttacccacctatgaactgaacctgcaagacggccacttcaccccaccccaattggcggtcaaggccggcgaacgtttcaagatcgtgctcaagaacctcggccaaggcccagccgaattcgaaagcacgccgttgcgggtggagaaagtcttgtcccctggggtgaccacctttgtggtgatccaccccctcaagccaggcacctatccgttcttcgacgaattcaacccccaactgcccgaaggcagcatccgtgccgaataggagccgttgatgaacacatcgatgtttattgtgtggcgcgaaagcgtcgaggcgctgctggtgattggcattctgcaggcctggatcagctgccaggccggtcgctcacgcctggcccgttacctctgggccggcgtgctgctgggcctgctcggctccgccgggttggcggggttgatgctgtgggccggcgaaaccatgaccggccccgcgggtgaatggctacaagcggcgctgaccctggtcgccagcggcctgatggtgcagatggtgttctggatgcatcgccatgcgcccaccctcagacaccggctggtcagtgaagccgaccagcgcctggcccgccacggcggctggggtgtgttgctgctggccctgctggcggtaagccgcgaaggcagtgagaccgtggtgttcctgtatggcgccggtgcccgtctgcacgacgaagccctgggcctgtttgccgtcggtggcgtgctggggctagtgctggccgggctgaccgtggtgctgttgcgcagcagccgacgctttatttcctgggcacgttttttcgccctcagcgaagccttgctgttgctgctgggcggcgcgttattggtcgctgcggtggaccgcatcagtgggcagctgctggcgatggacatgcccgactgggtctactcggccttcggtgacagccgctgggacagcagcctgctgctgaacgacagccacggcctgggcgcgttgctggcagacttcgccggctaccgcgccgcgcccagcctgatcacggtgctggtgttgctcggctattggctgctggtgggcaacggcctgcgccggtcacggcaagccgcatgagctggctacagcaactgggcgatggcatgcgccgccatgggcggctgatccgaagtgtgcaatgggcggtggtgctggtgtacgccgtgctgctggtgttgccgacgctgctgcccctgccggacagccaggcgcgcctgctcgacaacctcacgctgcttgcgcaattcatcttctggggcctctggtggccgttcgtgttgctgtcgatggtgctgttcgggcgcctgtggtgcggcgtgctctgcccggaaggtgccttgagcgaatgggccagccagcacgggcgcggcctgggcattccgcgctggctgcgctggggtggctggccgaccctgggcttttgcttgaccacgctctacggccagttgatcagcgtgtacgactacgcccaggccgcgctgctgatcctcggtggttcgaccctcgcggcggtcgtggtcggcctgctgttcgtgcgcggcaaacgcgtctggtgccgctacctgtgcccggtcagcggcgtcttcgccctgctcgcccgcctggcgccggtgcacttcgccgtcgatgaacaacgctggaaggccaacgccgcgccacgcctgccgttgcccaactgcgcgccgctgctggacatccgtcgcctgcaaggcgccagcgaatgccacgcctgcggccgctgcagtgggcaacgcggtgcggtgcaattgatcgcccgctcatgcaaccaggagattctccaggcacccctgcaccacggctcggcctgggacatacgcctgctactgttcggcgtgatcggcctggccataggcgcgtttcagtggacggtaagcccctggttcatcgccctgaagcaacacctggccgagtggctggtgagccgcgactggctatggccgctgcacgacaacgccccctggtggttgctcacccattacccgcaaagcaatgacagtttcagctggctggacggggggtgcatcgtgctgtatctggccggcagctcgctggtggtgggcggcggatgctggctgtggttgcaactggctgcgcgctcggcgggcgatcgcgcactgtttcggcccctggcgctgacattgacgcccctgggtggtgcggggttgttcctggggttgtcggcgaccacggtgaagctgttgcgctatgaaggcttggtattggcgtgggtgcaaccgctgcgagcggggatcttgatggcggcgatcggctggtgcctgtggttggcgtggcaacgactcgagggactgcctcgcggacgggcgtggctgtgcatgctgatgagtaccgggttgatcggctatggctggtggctgcagttctggggctgggccaactgaagcattgagactgtgggagggggattgccccctcccacatttgccaacttctcgctagaccttgaagcgcgccacggtctggtgcagcgcccccgccatccccgccagttcatgccccgccgtctccgtatgcaaggcgccctgcaacacctgctgcgacagggtgcggatgccaatcaggttgcgatccacctcccgcgccaccagcgcctgctcttcggtggcgctggcgatcatcatgttgcgctcgttgatctgcgagatagaccgggtaatttcatccagcgcctcccccgaacgctgcgccacgccgagggtcgcctgcacccgctcactgctgctgtgcatggccgccaccgcgtgttcggtgtcctggcggatattgccgatcatctgctcgatctcctgggtcgaggcctgggtgcgatgggccagcgcgcgcacctcatcggccaccaccgcgaacccgcgcccggcatcgccggcccgggccgcttcgatggcggcgttgagggccagcaggttggtctggtcggcgatgctgcggatcacttcgagcacgctgctgatatcctgcacacggcccgccagttgctggatgcgctccgaggtttccaccacgccggtggccagggtgttgatcgacgccacggtctcctgcacctgggcgcgaccgcgctgggcagtctgttccgacaggcgcgaagcctcgctggtactcaccgcattgcgcgccacctcgtccacggcggcggtcatctcattcacggcggtggccgcctgctcgatctcctggccctgggactgcaagctgctgctggtctggctgctgaccgcgctcaactcttcggaggaactggccacgccgtccaccgacgcggcaatctgccggaccatctggttaaggttctgctgcatctggtgcaggttacgcatcacactgccttcggcgctgttgcccagcggcacttcgatggtcaggtcgccttgggcgatatggctgagtacgcgcgccacctcatccggctccccgcccagcgggcggatcacgctgcgggtgacgatgacggcggcggtcaccaccagcgccacacacaacagcagcagccccagcatggtacgccgggcgtcgtcgtacagcacctgcgccgcctgctcacgctcggcgaacacgcgtccctgcatggccatcagcgcatccaggctcttgaacaccgcaagctcggccggcatcacctgttgcttgagctgggccagcccctgttcgcgggcgccctgtttgatcagcgcctgcacctgggtgaaggccgccacataggtttcacgatgggccttgagggtcgcataggcggcctggccttcggcagtatcgagcaacggttcgagggttgcgaacgcctcggtgatgcgttgccgggtgctgccgatcgaagcttgagcggcctgattatctgcgtcgatcagcaggtcgcgggtgttgcggccgttatcgcgcacgccggtggcgatcaccatgatcggcgcgattttcggccagtcctgctgcacgatctgtgcggattgttgcttgagggtcgccaggtcgtgcaaggcgtagaacaccaagccgaccagggccagcggcgcaatcgcgaaaccgatgacaatgcgttgtgccgtggttaactgcttcattctgaacattccttgatgaacacctgcccaccatgggcagcatctttaaaaaccggttgagggtgtcggtcaccctcgcaagacaaacgcgggaaacaactcgcgcaaacggccccacagctcgggcaacgcagcctgtgccggtgcactcggcaattgcgggtcgagcatgctgacggtgcgcaccatctgcacggcgaagcgctgcacacccgtggcttgcaaacgctgggccagccgcaacaaccggggtggatcgatcaggtgccaatgcaccgtggtgcggcactcgtagtccacgccactggcgagcaaggtgtcgaggctgcgccagttggcggcgccactgcccttgacctgggtgatcgactggcagtcttcggccagggccttcacgtcgaacccgacccagtcggcatgacgcaacgcattggcaaaccctgccggtttgatcccggcgctgtgcaagccgatgtgaaaacccatcgcccgcacttcatccatcgccgccggcaagccttcctgcaaggtcggttcgccgccgctgaacaccacggcatcgagcaagtcccggcgccgttgcaggaacagcagcacccggcgccaatccacctccgtgctggcgcgcggcgggatcaggtccgggttgtggcagtaacggcaacgccaggcacagccctggcagaacagcacgcaggcgagcatgccggggtagtcgagggtggtcaggggcaccaggcccccgacccgtagcgctcggctcattgccgcccggccgccgcagccgtttcggtgaagtgcacgcgctccttgtgctcggactgcttgccggggttgaacgccgaaaccggccggtgataacccatcacccgggtccagacttcgcagcgctgacgttgtggctgggatgcttgcatggtgaatctccttggggttgaaaagcttggtttaacgggcggctgccagggcttcatcgcacttggggcagaactcatgttcaccggccagatagccatgcaccgggcagatcgaaaacgtcggcgtcaccgtgaggtacggtaggcggaagcgccccagcgccttgcgcaccaactgcttgcaggcctgggtcgaggaaatctgctcggccatgtacaggtgcaacacggtgccgccggtgtatttgcattgcagttcgtcttgcagctccagggcttcgaaagggtcctgggtaaagcccaccggcagttgcgacgagttggtgtagtacggcgcgacatcgctgcccgcttgcaagatatcggggtagcgcttgcggtcttccttggcgaagcggtaagtggtgccttcggccggcgtcgcctcgaggttgtagagatggccggtgtcttcctggaagcgcagcaaagtggcgcgcacgtggtcaagcaacttgagcgcaaaggcgcggccctgctcggtgtgcatgccctgctcgtcaccgctgaaattgcgcagcatctcgtgcatgccattgaggccgatggtggagaagtgattgcgcagcgtgcccaggtagcgtttggtgtaggggtagagaccggcgtccatgtgatgctggatcaccttgcgcttgacctccaggctctccatggccatctccatcaggctgtccaggcgtttcagcaagcccgaggtatcccccttgaacaggtagcccaggcgcgcacagttgatggtcaccacccccaggctgccggtctgctccgccgagccaaacagcccgccgccacgcttgagcaattcgcgcacgtccagttgcaggcggcagcacatcgagcgcacctggttgggctgcatgtccgagttgaggaagttctggaagtacggcaggccgtaacgtgcggtcatctcgaacaggcggtcggcgttgtcgctgtcccaggggaaatcatgggtgatgttgtaggtcggaatcgggaaggtgaacacccggcccttggcgtccccggcctgcatgacttcgatgtaggcacggttgatcaacgccatttcggcttgcaggtcgccataggcaaacggcatttcctcaccgccgatcaccggcacctgttcacgcagatcttctgggcagacccagtcgaaggtcaggttggtaaacggcgtctgggtgccccagcgtgacggcacgttgaggttgtagatgaactcctgcaccgcctggcgcacttgcggatagctcagctgatccttgcgcacatagggcgccaggtaggtgtcaaaggaactgaacgcctgcgcgccggcccactcgttctgcagggtgccgaggaaattgaccatctgccccagcgcgctgctcaagtgcttgggcggccccgcctccacgcgtcccggcacgccattgaggccttcgtgcaacaacgaacgcagggaccagccggcgcagtaaccggcgagcatgtccaggtcatggatatgcaggtcggcctcgcgatgcgcacggccgatctgctcgctgtagacctcatccagccagtaattggcggtgaccttgcccgccacattcagcaccagcccgccgagggaatagccctggttggcgttggcctgcacgcgccagtcttcgcggtcgaggtattcgttcatggaggtggcgacttccaccagggtcttgcggtcgcggcgcaggcggccgtgttgttcgcggtagacgatgtaggcgcgcatcgacaggaagtagccggcgtccatcaatacgcgttcgacgctgtcctggatttgttcgacgtccagttggtcgatgcctctcaggcgggccaggacggcgcccagcagcaggtcgacgtcggggggctggtattcgccggtggcggtgccggcggcgatcagggcctggcggattttttcggcgtcgaaggggacgagcgtgccgtcgcgtttgtgtaggcgggtgctggtcaggggggtgagcgcggtttgcattggggggctccagacactacatatagatattttttagtctttaaacacaatatgcggtgatattacgaatagctcggagagtgtcccttgatcgggatcaaggtttttatgatcgggggcatatccgttatttaggtcacggcggatattggttccgcccttacggcgggtcactttggaaaagagcctgtatggaccggacacatggttgacgggtgtacggggacatggtggacacttttcggcggataaacttcgccgggaaatcatcatgccttgggacacgagagataccatgagcctgaaagaaga

SEQ ID NO: 84 - DNA, 14711 bp, Pseudomonas nodulensis; identical to SEQ ID NO: 9

SEQ ID NO: 85 - DNA, 12189 bp, Pseudomonas nodulensis
cggtgtgtcagccaactcatcagtgactgacccactgccatcgggggcaagccccctcccacactttgaccgagtaccggccattcaatccggtcggctctaaggccgccgcgctcttgatcttgatctggggcgccccgtcaaacacgctggccgaacgcaggcttgaatccgtgggtaacccggcaggacgccgggttagccgtcctgggccaaggatggcccatgacggcggcccacggattcaagccggagtgagggaacaccgagcctaggcgaggtgccgagtgttggggcaagagcgttttgcttacttttgcgctcttcaaaagtgagccgccgtaagggcggaaccataggtggccgttaccgaagaaatggatatgcccaccgagcccccccccccaacgagtcatatcccaaaccccggcgccgcagatagcgtcaggtcgcaagcccccgccccgcccgctccagattgcgccacaaccagggcggtaagacatccgggtcaaggctgtcgatcaggttcttcaagcccaaccccagctccgtatccccttcgatcaccaggcgccgccggaagaacaacgtatccgggtcttcctgccgactggccagcaacaagaactcgcgccaattgccgctgatggtcacttgggcctgcgccttctgcgcaatccgcaacccatcccgcgtcaacgtcaggtaccagcacaagcccaggtccggaatgcgcaggcacatccagcgtccgcgcagcaggtcaaaaccgtcgtcgcgcagcggctcggccaggcagcggttgagcccctgttgcaacgccaggcgctgcaccgcgaaaggcacacggcgaatcagcgacaatacccggtcagcacccttgagcaaccattgcttgcgattcaacacaaccccacctcctcgacccgcaacatgccggcctgcccatgccagtaaccgttgcagccactcaccagcaacggcggcgtggcaccctggcgcacctggtcgaaggcacgcaccacctcggccatgccttcggcccgtgggctcaggcgcaacaggtcggcgccacaggcgaccaagccgggatagtcagccagcaagttggtcacctcggcggacatcgtctgaatcccattcaaggtaaacagcgcctgcccttcctggctggtcaacgccatgccatccgggtagttgatgcagcaaaactggcagtcgtccttgggacgattctccgcacgggcggtgaagcagcgcgccgagtacgctaggggcaaatggccgtaggcgaagatctccacttcgggcagcggccgtcccagttcgcggacctgctccagcacatcggcgatcaagccgtgggagcattccaccggcggcacccagcgctgcatgcccgcgtcgagcagctgcaccagcgcgtggccgttgtagaggttgagcgccgggccaccgacaaagggcactttgcgctcgatcagcaactgcacggcgcccatgtcgttggcctccaccagcaactcgccgttgtcgcacaggcggcgcaggctggagagttcggacgcggcttcgatcagggtgaggctcgacagcacgatctgcgccgggctgcacgcctgcaactcacggcccaggcccagccattgatccaggttcagcgcgcggcgtttggcgcacacggtttcccccaggtaaatcacgtccaggggcaaggcggccatgtcggcgtagaagcgccccaactcttgcttgtcccaataaaacagcaccggtcccaggctgagtttcatcgatgtgtcctcattgccatgcacgatggtaagcccccagggtggtctggctgccttcggaaagcccggcaagcacctggcgccattggtccttgaccacgaaatgggccgggctgctgcggtgcgcgtcgagggcggcgcgccacacgcgggtgacttgctccacataggccgggctgcgttgccggccttcgatcttcaccgcttccacgccgatcgcactgagttcgggcagcaggtccagggtgtcgaggctggtgggttcttccagcgcatggaagcgcttgccgcccaccaggaaacggcccttgcacagggtcgggtagccggcgggttcgtccggggtgtagcggtcgatcagcacttcgctcaggcgtgcgctgaggccatcggcatcctcgctccagcgcaccgccttggccggcgaacacacgccgcacaggttgggtgattcacccgtgatgtaggaggacagatggcaacgcccttcggccatgatgcacaggctgccaaaaccgaacacctcgatgggcaccgtgccgctggccgccacctgcttgacctgcgccaacgacaacacccgtggcagcacggcgcgccggataccgtagcgctccacatagaatttcaacgccgccgcgtgggtggccgagccctgcaccgacaggtgcaacgccagctgtggatgatggtgcgcggcatagccaagcacaccggggtcaccagcgatcagcgcgtcgacgccatggtcggcggcgcggtccacggcgcgctgccaacgcgaccagatcttcggctgcgggtaggtgttgaccgccacgtagagcttgcgctggtgctggcggatatgggcgacggcggcgtcgaactgcttgtcgtccatgttcagcccggcgaaatgccgggcattggtgtcatcgcgaaaacccacgtacaccgcgtcggcgccttggcgtacggcggctttcagcgcaggcaggttgcctgccgggcagaccagttgcatggtggctccttattgaaaatcggcaaacggcaggaacggcacggcggcgcccttgagcacctgctgctcgcgctcgacgatcaccagcccatcggcccagcaggcggcggcgagcatcgccgagctttgctgggggtgcaggattgcgcgcagctgcccatcgctgtcggggctcaagcgcgcacgcaggtactggcggcgcttgttgggtttgagccactcgaaggccgccggcacgctgacaggcaccggcaacacgcgctccacgccttgggcgcgcagcaggaacgggcgcaccacgatcagcgtggtgaccagcgcggcggtggggttgcccggcaggccgatccagggtttgccggccacttggccgaacgccaggggtttgccgggctggatcgccaggcgccagaactcgaccttgccgagtgcctggatcgcttgtttgagatggtcctcttcacccaccgacacgccaccggtggtcagcagcaggtcgcactcggacgaggccagcaccaacgcatcgcggctggccgccagcgcgtcggccatcacgccgtagtcgtgcacctccacgccccagccacgcagcaacgccgctacgaggtagcgattgctgttgtagatctgccccggcgccagcgactcgcccggctcacgcagttcatcgccactgctgagcaggcacacgcgcagtggccggtagaccttgacccggggaatgcccgccgccgccaacaggccgagttcctgggcgcgcaggcgtttgccggcgctcagtacccgttgcccgcgttgcagctcttcgccgcgcttgcgaacgtgttcgcccaggcgcaacggcgggcaccagatgcgctggccatacacccggcagcgctcctgcggcaccacgctgtcggcacccggcggcagcggcgcgccggtgaagatgcgcacggcttgcccgggctgcaacggcacatccgtgctgtgcccggcggcgatccgcccgaccacttccaggtaaccgccctgctccggcacgtcaaacgcgcgcagggcgtagccgtccatggcgctgttgtcccagcccggcaggtcacggggcgagaacacctcttcggcggtcacccgccccagggcatcggccaacgcaagcatttcggtggacggtggcggcggtgcctgggccagcaactgctcgatggcctcttccacgggcagcaggtcgccgctgtcgcagggactcatgagcgtgcctcacaagcagcgagtatctgatcgagttgcggcttgaggtgcggcgcaaaattgcacgggccggtgcggctgtccaactgaccaaccaggatctggtcccaggcagtacgacaggcccccggcgaaccgggcatgcagcacaccagcacgccgttgctgaaaccggccagggctcgggattgcagggtcgacatgccgatttccgccagcgatacctggcggaacaactcgccaaagccgtccacctgtttgtccagcaacggcaacaccgcctgaggggtgttgtcgcgcgcggtgaaaccggtgccaccggtcatcagcaccacttgcacctgggggtcggcgatccattgcgagacgcgcgcgcggatctggtagatgtcatccatcacgatgccacggtcgatcagcatgtggccggcacgttgcaggcggtccaccagggtgtcgccggaggtgtcggtgtcgtaggtgcgggtgtcgctgatggtcagcaccgcgatgttcagggaaacgaaactgcgttgggtcagatgggccatgatccaggctccaggcgttgaaaagatgcatccagcctgcgccgcatcgggcgcagggcctattcctcgaaggaggtatgccgtcagggggccaggcgcgtgcgctgccacccggcgtcatgcaggcgatagtcaagacggtcgtgcaagcggtccggccggccttgccagaactcgatacgttggggttgcaggcagtagccgccccagtgctcgggccggggcggctggcgcccggcaaaccgctcggtgacctcgcgcaggcgcccttccaactcactgcgatgggccagaggctggctctggggcgaggcccaactgcccaactgactggcgaccgggcgggcatcaaaatagtcgtccgacagctcggcatccgccttcgccaccggcccttcgatacgcacctggcgctccaggcccggccagaagaacgtcatggcggcatgggggttgtccgccagttcatggcccttggcgctctggtaattgccaaagaagaaaaacccgtcggcgctgaagcccttgagcagcaggatgcggcagtgggcatgcccctggccgtccaccgtggccagggccatgctgttggcctcggcgggcggcacttcggtcttgcgggcctgctccagccactggccgaacagctccagcgggtcggcctgcgggcagtcatcgcgcaggccgtagagggtgtagttgcggcgcaattgcgcaagggacaggggcatggggcggtcctccaggaagttcgccacagtgtgagaactggcgcgccgccgtcccttgaccgtgatcaacaatcgcccgcggcatgacgccgcatgccgcttaccacaacgacttggcgatgatcacaatcagcaccatgtgcaggaggatactgcgccgaatccaccgtgcacgcttggcgctcaggcgctgtttacccagccagtacgccagcagcaggtagtgcccgatgatgctcagggccagcaggactttcaggctcagcagccacgcaaaacgaccactccacggcatgccccagtagtgccaggccagccccagtcccgcgccgtacagcacgatgaccaccagatgcagcacgcgtcgcgagcgccgggcaatcgcctggtcgcaggtgaactgcgcggaccaggccaactcctcccgggcgctgtgccagatcaccacttcaaaaaacaacgtgccgatgaacgcgatggccgccagcagatgaaccatcaatagcactgaatacatggatctctcctaacccggatgcccgtccacacgcgcccgccacagcatcggcccgtagcgccacaggtacagccccagcccgatggaccagcacagcgccgccaaccacaatgccgccaccggccacaccagcaccgccagcacccggcacacacacgccaggttcagcaacgcaaaggccagagtcatccccgagggcggctgcaatggccggccggtatggcccaggctgacccgcgcgatcatcgccaggatcaacccggccatggcgccgatggtcagcgcatgcaccgccaggctcgggttgagcggcgcgccaaaatgccacagcgccatgcccaggcacgccagcgccaaccaggcataggccaggtgcagggaccacagcagcggcacccgccacaggccgcgagcatgccaacgcgccaggcgcaacagatggcccacgcccagcagcgcgaacagcacaccgatccaggcccgtggcaacaaggccaccccaccggcatacaacaacgctaccagcaccgaaccgcccaacagcaggtgatccaaccacggccagggcttgaccgccgcaacccgacccaggccgcgttgggtgaaaaacgggatcacccgtccgccgatcagccccatcatcgccgccaccaaccagaggccggtcaacactgcctggcgctgcaagccctggtcatacagtgccaagccatcagccaccgccagcaataccagcaccagcacaatcggataattgcgcgtctgtcgcacctgccacagcgtccatcccatcacgcccgccaccgccagtgggaagctcagttccagtaccgccagcaatggcaggggaacgttgagcaaccagcccacgcgcgccgccagccacagcgccgcgagtgcgcccaagggtgccccgctgagcccgggacgaccggtccaggtctgcaccgccgtcagcagaaaaccggcgatgatcgccaggccaaagccgaacagcagttcatgccgatgccaggccagccagccgccggccggttgccaactgccggtcatgccgcccagggccagcagccacagcggcaccgccagcgcggccaacaggcaggcaccgaggaaaaacggccgaaaggccaggcgaaacaacggggtaatcgacatggccttgcgtcgatccagtacgtgcatggcagggctcctgaatgtatcactgcgccgatggtgcacctgtacgcgcgtcttgcccttgtcgcagatcaagctgcgccaagggcaaccggattaacctcgacgcccctttccctttgtgccccgaggtaatgatggtgctccatcgtgtccatcaccagatcctgcgcagtcatcacctgttcgagcccatggacgagctccaactcaacgagctgatgagcagcagccagttgctcagcgtcgacaagggccagcccctgttccgccagggcgaaccggcggacgccttctacttcgtgattgccggtgcggtgaagatctaccgcttgaccccggacggccaggaaaaggtcttcgaagtggtcggcgagcgccgcaccttcgccgaagcgatgatgctgatggatacgcccaactatgtggcgtgcgccgaagccgtgtgcccgacccagttgtaccggctgtccaacgccacctacatgcgcctgctgcacagcaacagccgcctgaccttcgccctgctcggcacgctgtgcgtgcgcctgcaccagcgggtcaacgagatcgagaccctgtcgttgaagaacgccacccaccgcgtggtgcgctacctgatgacccagttgatgcgcctgccggtcggcgaaaaccgcttcgaactgcccatggccaaacagttgatcgccgggcacttgtcgatccagccggagacgttctcgcggattatccggcgcttgatcgacgaacagatcatcacccaggacgctcgccagatcgcgattctcgaccgcctgcgcctggagcaattcgagtgaggacctgcctgtattgccagcaccgcaatgccgtgcagcgcgacacctgcgagcactgcgccatgccgctgccgagcgccgaggccggccaccaggcgcggcggctcagccgtttccagtggttctgcgtgggcctcgcgttgttctgcatcgcgatgtttttctggctgccccgtgatatctactgaccctcggtgagttgtcggtacagctgcggcaaacgctcgggcaactgctgcggctggcggatcagcgtgaagccatgggcgccgaacatgtacggcaggtagtcgccggcctgcttgtcgatggtgatgcagaacggcaccaggccttggcgcctcgcctccagcaccgcctggcgagtgtcttccacaccgtagcggccctcgtagaggtccaggtcattgggcttgccatcggtgagcagcaacagcagtttgcgccgttgcttgcgggcgcttagcaggtgggtggcctggcgaatcgcggcgcccatgcgcgtgtagtaacccggcttgagggcctggatcaccccgcgtgtgcggtcatcgtaggggtgctggaacggtttgatcacctgcaggcgtacctgctgccgacgcagggacgagaacccatacagcgcaaagcggtcccctgcccctgccaggctttcgccgaacagcaacaggctgtcgcggatcacgtcgatgaccttttgcgtgtcgttcagatgggcgtcggtggacatcgacaggtctgccagcagcaggcaggccaggtcgcggtgggtatggcgctgctgcatgaacagcccgcgttcggcacaggcgccgtgctggcgctccacatgaaagtccagccaggcctgcaggtcgagttcgctgccctgggactgctggcgttgccattgacgctcggtgcgcaggtgctggaactggcgccgcaggcgttgggcctgggcgtgcaggcgcgcgggcagcgcttggggttgatcggcgcgtggttgcatcagttgcaggttgacgaaggcgtcctgcaagcattgccggcggtagtcccattcgggcagcttgatgccctcgccgagggggatgtcgtcgacatcggcgggcggcaggtccaggtgcagtttcagcccgccactcttgcgcacgcgctggcgcgacaggctcaggtggtcgaggtcttcggcgacgcgggcggcgtcggggtcctggctgtcgtcggtccagcggtcaagctcgacgtgctcggtccagctgaacaggttttccaggcgcaccaccagcaggccgccgtcgcgggcctggtcatccaggcgtgtggcgcgcttgggcgggccttgttgtgcgcccggcggcgccgacaggtcgtcaccttcgtcgtcgaggtcggcgctgtgcggtgcgtccagctgctgcggtgggtacagccataacggcaatggccacggggcgcgctcgctgcgcggcagttggcgcacgctaccgggttcgcgcagggccttgcacaaggctttttccagggctgcttcgtcgggtttgaggcccgccgggtcggggcgcaattccagatgggcatgcaccagccggcgataacggggcagcatcgccgggtagcgttgcagcaacagccaggtccagcgttgattgtcgcgggcccagtgggtcatggggccggcgtgggcggcgagcaatgccagccattggtacaagtcggcattcagcgccgggtcgggaaatactgccaggctgatcggcaagcgcaggcggttgccgtcacaggtggccagcggtgcctgtttgcaggtaccggcgatgcgcatcagcaggttgcgccgcagcaacaggtcgcgctcacaggccgcctccacggcgatgccgcccgccccaccgagggctcggaacagcagcgccacacggcgttgatggtcggccagggcaacccgcgcttcggggaaatccacactggcgcggcgtgtgataaagcggtgccaggcactgccgacccattcttcgagttccagggtaaaggccatgtcattgctccaaacgtaaaacggcccgctgtaccagccgggccgccctcttggggattaacgttgttgtctatacggcggggaccggctcaccgatcaccccgcgccgttgccggaagctgtacaggtagcagagcagccccagcaggaacaccacgccgctggccaaccgtgcccagaacagcgtattcaggtgctccaccgtggccatgaacggcagcgccacaccgtccaccggccagcgctgcaaccacacctgcacggcgccggcggcggtgaggaacagggtgatcatcaccatcgacaccaccatcagccagaagccccatacctcgatggtctgcgaacgcgcatccggcgcttcaccgaggccacgcaggcgcggcatggcgtagctgatcagggtcatcacgatcatcgcgtaggcgccgaagaacgccaggtgcccgtgggcagccgtgagctgggtgccatgggtgtagaagttgaccggggccagggtgtgcaggaaaccccagaccccggcgccgaagaacgccgtcaccgtggtgcccttggcccacaacgtcgccgcccggttcgggtgctggcgccgacggcgtttgaccatggtgaaggcgaacatcaccatcgccaggaacggcagcggttccagggccgagaagatcgaaccgacccacaaccacacctgcggcgcaccgatccagaagaagtggtgcccggtgccgatgatcccggtgatcaacgccatggcgatgatcacgtacagccatttctccaccacctcgcggtcgacgccggtgaccttgatcagcacgaacgccagcatcgagcccatgatcaattcccacacgccttccacccacaggtgcaccacccaccaccagtagaacttgtcccgcgcgaggttcccggggttgtagaaggagaacaggaagaacaccgccaggccgatcagcccggtcatcatcaccatgctcaccgtggtcttgcggcccttgagcagggtcatgccgatgttgtacagaaagcccaggcacaccaccacgatgcccatcttggtgatggtgggttgctcgaggaactcacggcccatggtcggcagcagttcgttatgggtcaatttcgccagcgcggcgtacggcaccagcaagtagccgaggatggtcagcacgccggccacggcgaatacccagaacaacaggatcgccagtttcgggctgtgcagctcgcggtccgcctcctcgggcaccaggtaatacgccgcgcccatgaagccgaacagcagccacacgatcaacaggttggtgtgcaccatccgcgccacgttgaacgggatcagcgggaacagaaagtcgcccaccacgtattgcaggcccatgatcagcccgaacagcacctggccgacaaacagcatcagcgcaaacacaaagtagggtttggccacggcctgggattggaatttcagatagggattggcgctgcgcatggctcagccctccttgttcggtggccagttgttggtgtcgatcttcgagctccatttgaggaactcggacagatcgttcacctcctggtcattgaggttgaattgcggcatggcccgacgccccgggacgcccagcggttgcatcttcatccaggcgtgcaggaacggcttgaacccttcttcaccgccccggcgctggaacacattgcccagctccggcgcaaagtaggcgccctcgcccaacagcgtgtggcagccgacgcagttattgcgctcccacacgcccttgccacgcaccaccgactcggtgagctggtcggcgttgctgcggacgggaaaggtctgttcggtgtgataggtcagggccaggaaaatcaggaagaagaacacgcttcctccgaagtagatattcctggccatgcccttggtgaaggtctctgacatggtcgtcttcctcatggcttggcgggggccatgataggaaggtggggttgggaaactgcttgatggcgatcaagaaagcctgatcggatgactgggtacatatccgttgctgcggtaatggccacttatggttccgctcttacagcggctcactttggaaaagccggaatgccggcccagcccaaagtaagcaaagggctcttgccccaaacactcggcacctcgcctaggctcggtgttccctcactccggccagcgtgtttgacggggcgaccccagatcaaaagcaagagcgcggcggccttagagccgaccggattgtatggccggtactcggtcaaagtgtgggagggggcttgcccccgatggcagtgggtcagtcactgatgagtt

SEQ ID NO: 86 - DNA, 76919 bp, Pseudomonas nodulensis
cccgtcaaacacgctggccggaattcggcagggatttggggggtaaaccggcagggatgccggtttagccgccccgcgccatggatggcgcgtggcggcggccccccaaatcactgtcgaattacgggcacaccgagcctaagcgaggtgccgagtgttggggcaagagcgttttgcttacttttgcgctctatcaaaagtgagccgccgtaagggcggaaccaataccagccatcacccaaataacggatatgcccccagacttaaaccaacacccccacacacccgaccaccacccaagcccaccccaacaccccccaccgccacccccaaggcgcatcccgcaattccatgaacccatccgcaatcaaccacgacttgccaaccgccaacagcaacaccccccacccaccagcgccccccgccaacaccgtccccacactcaacaaaaccagcaccacccaacacaccatcaacccctgcgacgcactcatccgctcctacctcatcacatacaccaccggaaacaacaccacccacaccaggtccaccatgtgccaatacagcacccccgactccaccccattcaccgccaccccaccccgccagcacaccaacgccagccacccaaggatcagcatgcccagcagcacatgcaggaagtgaaaccccgtcagcacccagtaaagggtgaaaaaccggctgtactccatctccaaccccacctccaccagatgggtgtactcgccaagcttgatccccacgtataccagcgccaccagcagcgccgcgccaaacagtccggcgctgcgctgccaatgtcccaggcgcacctgctgcaaggccaacgccgcgagcagcccggtcgtcaacaggctcacggtcatcgccagcccgctggaggtgtccagttgtgcgcggcccgaggcaaacaccacgggttccaggcgctgggtcacggcgaatgccaggatcagcatcgcgaacacggtcaattcggcgaggatgaaaaaccacatcgccaggtcacccggcaggcgccggggctcaggcaaagtgcacatccaccacgtccatcagcccggcgacggtctgcgggtcgtcgctcagggcctgggccaggcaagccatgcaggcttcacgcgggggcatgccggcggcgatcaggcgggcggtgaagatcagcagacgggtggaggcgacttcttccaggtcgtgttgatccaggcgccgcaacgcctggcccaggcgtaccacctcagtggccaacgcgttatccacctgcgcctcccgggccacgatgcgcgcttcgtccgccgccgccgggtagtcgaagcgcatcgccacgaagcgttgacgggtgctgggcttcatgcccttgagcaggttctggtagccggggttgtacgacaccaccagcatgaacgacggcggtgccttgaccacttcgccggtgcgttccaggtacagctcgcggcggtcgtcggccaccgggtgcaggaccaccgcagtgtcctggcgcgcttcgatgacttcgtccaggtagcagatgccgccttcgcgcacggcgcgggtcagcgggccgtcctgccaccaggtgccctgggcgccgatcaggtggcggccgaccaggtcggcagcgctgaggtcgtcatggcaggccacggtgtacagcggcaggttcaggcggtgcgccatgtgctgtacaaagcgggtcttgccgcagccggtcggacccttgatcagcaccggcatgcggtgacgccaggcgtgctcgaacagtacctgttcgttggcgaggggttggtagaagggtgtggtcatggccggtatccaaagcgggttcgacagccacgctaagggcgcctgcgacaacctggcaagcgctacccaaggcaaacttgatcgccgtcaagcgagcattccaacacgtcgccatagtctggccgggcactaagaacctgcgccccgcacctgttgcgtggcatcgcaaaggtctcgcctgaggagtacatggaatgctgactcgcacccgcaaaaccttcaccctgagcctcgccagcctgagctgcgcgctggccctggcaatgcccccgacggcccatggcgccgcgcaacccgcgctggtgaaaactgccggcgcaccggacatgagccaggccgacttcgacacctccaagcagatttacttcgaacgctgcgccggctgccacggtgtactgcgcaaaggcgccaccggcaaaccgctgaccccggacatcacccaggcgcgtggccaggcgtacctcgaagcgctgatcacctacggctcccccgccggcatgccgaactggggcacctccaatgcgctgaccaaggcgcagatcagcagcatggccaccttcatccagcacaccgcgcccacaccgccggaatggggcatggccgaaaccctcaagacctggaaggtgctggtcaagcccgaagaccggccaaagaaacagctcaaccagctcaacctggacaacctgttttcagtgaccctgcgcgatgacggcaagatcgccctggtcgatggcgacagcaaaaagatcgtcaagctgatcgacaccggctacgccgtgcacatctcgcggatctccgcctcgggccgctacctgctggtgatcggccgtgacgccaagatcgacatgatcgacctgtggcccgccgagccaaccaaggtcgccgagatcaaggtgggcatcgaggcgcgctcggtggagacgtccaagttcaagggttacgaagacaagtacaccatcgccggctcctactggccgccgcagttcaccctgatggatggcgaaaccctggagcccaggcagatcgtatccacccgtggcatgaccgtggacaagcaggagtaccaccccgaaccacgcgtggcggcgatcattgcgtcccacgaatggccggagttcatcgtcaacgtcaaggaaaccggcaaggtgatgctggtcaattaccaggacatcaagaacctcaccatcaccaccatcgacgccgcaccgttcctgcatgacggcggctgggacagcacccaccgctacttcctcacggcggccaacaactcgaacaaggtggcggtgatcgactccaaggagcgcaccctcaccgccctggtggacgtgggcaagaccccgcaccccgggcgcggcgccaacttcgtgcacccacagttcgggccggtgtgggccaccagccacctgggggacggcggcatttcggtgatcggcactgacccggtcaagcacgcgcagtacgcctggaagcaagtggcttcgttgaagggccagggcggcggttcgctgtttatcaagacccaccccaactcccaccacctgtacgtggacaccacgctcaaccccgacgccaagctcagccagtcggtggcggtgttcgatatcaaccacctcgacaagggctacagcgtactgccgattgccgagtactccggcatcaagcaaggcgcgctgcgcgtggtgcaaccggaatacaacaaggccggcgacgaggtgtggttctcggtgtggaacggccagaccgaagagtcggcgctggtggtgatcgacgacaagaccttgaagctcaagcaggtgatcaaggacaagcgcctgatcaccccgaccggcaagttcaacgtgttcaacacccaacacgatatttattgagcccaatcaacaagaggtccgccaatgaaaaatattctcctcgcactgctggcaaccgccgctgcgttcagcctgcaaccggcgctggcgcaagacgggccggccctgttcaagagcaagccctgcgcggcctgtcatgccgtcgacagcaagctggtggggccggccttgaaggatgtcgcagccaagaatgccggtgtgaaagacgccgccaccaccctggccagccatatcaagaacggcacccagggtaactgggggccgatcccgatgccgccgaaccaggtcacggatgacgaagccaaggtcttggccgagtgggtcctgaccctgaaataaccgccaaggagcgcgccatgaaagtctcgatgatcagttcggccatggcgctgcttctactcattcccatgcccgcaggcgcagtcgtggatgcccaacgattggaacatctgctgacccaggactgcggcgcctgccacggcctgtacctcaccggcggcctcggcccgccgctgacaccccaggccctcgccggccagagccgtgacagcctgatcgccaccgtcacccatggccgcccagcccgtgcgatgccgggctgggcgccgctgctcagcgcgagtgaaatcgcctggctggtcgaccgactcctgcaaggaagccccaccccatgatccgtcccaccctgttagccgcttgcctattgctgggcgcctgtacccaaccgacgttgcgcggcaccggcgacctgggcctggtgatcgaacgtaccagcgccagcgtacaaatcatcgaatccaccggcatgagcaccctggcgcgcatcgaaggcctgggcgatctgtcccatgcctcggtggtgttctcccgcgaccagcgccatgcctatgtatttggccgcgacggcgggctgaccaaggtcgacctgctgggccagcgcatcgaaaagcgcatcctccagggcggcaacagcatcggcggcgcgatcagccaggatgggcgcctgatcgccgtgtccaactacctgcccggcggggtcaaggtgttcgatgccgtcaccctggcccaggtggcggacattcccgccaccgccctcgccgatggcaagcgctcccgcgtggtaggcctggtggacgcgcccggccagcgcttcgtgttcagcctgttcgacaccggcgagatctggagcgcggacttcagccagggcaacgcgccacgcatcagccgtttcaccggcatcggcgagcagccctacgacgccctggtcaccgccgatggccgctattacatggccggcctgttcggtgaagacggcatggcccagctcgacctgtggcacccggaacacggcgtcaagcgcgtgcttgccgactatggccgtggccagaaaaaactgccggtgtacaagatgccccacctcgaaggctgggccgtggccgacaaccaggcctttgtgccggccgtgggccgtcaccaggtgctggtgatggatgcccgcagttggcagcagaccgctgccatcgccgtggccggccagccgatctttgtcaccgcgcggcccgatgggcgccagctgtgggtcaacttcgcctacccggacaacgaccgggtgcaggtgctcgacagtgaaacccaccagatcatcgccgacctgcgccccggccccggcgtgctgcacatggagttcaccgggcgtggcgaccagctgtggctgtcggtgcgcgacggtgaacaggtgcaggtgtgggacccgtatcgcctgaccttgctcaagaccctgccggccttgagccccagcgggattttcttcagcaaccgtgcgcaaaaaatggggtattgaaatggaccttgacctgctcagccgtcgactgatcgaccgttaccagcacggcatgccgctgtgcgccgaaccgtaccgggagatggcccgggtgctcgactgcactgaagccgaactgatggcctgcctgcaacgcctggaactggcgggtgccttgtcgcgcatcggcccggtgttcgaacacacccgcgccggcgccagcaccctggccgcactggcggtgccgatcgagcgcctggaacaggtggcgcagcgcgtcagccagtacccggaggtcaaccacaactacgcacgcgaacaccactacaacctgtggttcgtgctgaccggcccgcaccgccagcacttggaacaggtgctggcggaactggagaaagacaccggcctgccgcccctggacctgccgatgctcaccgcctaccgcatcgacctggggtttgccctgggagaacatccgtgatcacgccgctgaaccacgaacagatgctcgacctgcgccaatgcctggagcgcggcctgccccaggttacgcggccgtatgaggagttggcggagctgatcggcgcccatcacgaccaggtgttgcagcagatgcagcaatggcacgagcaaggcctgttccgacgggtcggcctggtgctcaaccaccgtgccctgggctttgtcgccaacgccatgctggtgctcgacgtgccggacgcgctggtggacgaagtgggcacgcgcctgggccgcgccgtcgggatcaacctgtgctaccagcgcccccggcgtttgccgcaatggcgctacaacctgttctgcatggtccatggccgtgaacgcgaagccgtgaccgcgcatatccaggcggtgttgcaacaacagcagctcagcgacctgccccaccaactgctgttcagcacccgcgcctacaaacaatgcggcggacgtttcgcaccgccgccgtcacaggtatgggcccatggatgatctcgatcgccaactgatcaatcgcctgcaacgcggcctgccgctggtgcgccagccgtggcagcaactggcgcaggaactgcacagccgcccctgcgagttgctcgaccacctgcatgacctgctcgaagacgacgtgctgacccgcttcggtccgatgttcgacatcgagcgcctcggcggcgccttcaccctcgctgcgttggcggtgcccgaagcccgcttcgaagcggtggctgcgcaagtcaacgcgctggcgcaagtggctcacaactaccgccgcgaataccactggaacatgtggttcgtgctggcctgcgccaccgaggcggagctggccgccaccctgtcccgcatcgaagccctcaccgggttggcggtgctcaatctgccgaaggagcaaacctaccatgtcggtgtgtatttcccggtctgacaacgccctggccctgcgcttgatcgccctgacccaaagcggcctgccgctggtggaggacccgtgggcgtggctggccgagcaattgggcatcagcgtcgaatcgaccctggacctgctcaagcgcttgcaggctgaaggtgcgatccggcgcatcgctgcggtgcccaaccactaccgcctgggctatcgacacaacggcatgaccgtgtgggatgtagtcgacgagcagatgccgcgcctgggcgaactgatcggtgcgcagcccttcgtcagccactgctaccgccgaccacgccgacccggttggccctacaacctgttcgccatggtgcatgggcgcagccgcgaagaaatcgacagctaccgtgagcacctgcgttacctgctgggtgaagcctgtggtgctgacgaaatgctggtgagcagccgcatcctgaaaaaaaccggcctgcgcctggccccctcgcactagaaggagtgccctatgctgcggatcagtcagtacttgcgtaccctcgccggccgctgcccgccgccgcgtgtgtctacacccggcagcgaccgcccgccggtggtgatctggaacctgctcaggcgttgcaacctcacctgcaaacactgctacgccaccagcgccgacagcgtgtttcgcgacgagctggacaccgaggcagccctgctggtgatcgatgatttgcacgcggcgggcgtgcgcgtgctgatcctgtcgggcggtgaaccgctgctgcgcgaggacctgttccagctcagcgcctatgcgcgtgacaagggctttttcgtcgccctgtcgaccaatggcacgctgatcgatgagcagaatatccagcagatcgccgacgcgcgcttcgactacgtcggcatcagcatcgacggcctggaggcaacccacgacgcgtttcgccaactgcacggcagcttccagcgctcgatgcacgccattcgcctgtgccgcgaagccgggatccgcgtggggctgcgcaccacgttgacccaggccaaccacgcgcaactgccgcagttgctggcgttgatgcgcgcttacgatgtgcagaagttctacctgtcgcacctcaactacagcgggcgcggcaggcgcagccgcttgctggatgcacaccggcagatgagccgtgacgccatggcgctgattttccagcaggcctggcatgacatcgaacagggtatcgacagcgatttcgtcagcggcaacaacgacgccgacgccgtgctgttgctgcagtgggtgcaccagcatctgcccgagcactacccgcagctcgaacacttgctgcatggctggggtggcaatgcctcgggcagcggcatcgccaatatcgacaacaccggcgaggtgcacccggacacctactggtggcagcactcggtgggcaatgtgcgcaacacccgcttccgccagctctggctggaccagcccgacccgttgctgctgcgcctgcgcgaacacccgcgccgcatcggcgggcgctgtgccgagtgccgctggctggcgatctgcaacggcaacacccgcacccgcgcctgggccgatggcgacctgtgggggccggaccccggttgctacttcaacgatgccgaaatcgcccggcatcccacaccgttgatcccttgcaccacccggtgacacaaccgggggcgcctacctgatgatgaaccaaggatgtctcatgcacacgccaaccgccctacccgccagtctgcacagccccttccaccccggtgaagttgccttggtcggcgccggccccggtgacccgcgcctgctcaccctgcgtgcctggagcctgctgatgcaggccgacgccgtggtgttcgaccggctgatcagcgccgagctgctggcgctgatccccctgagctgcgcccggcattacgtgggcaaggccagcggctaccacagcctgccccaagaccaactcaacgcactgctggaggaactggccgagcagggtcaacgggtggtgcggctcaagggcggcgacccgttcatcttcgggcgcggcgccgaggaactcgaatacctgctggcacgcgacatcccctgccaggtggtgccgggcatcaccgccgcctccggttgcagcgcctacgccggcatcccgctgacccaccgcgatttggtcaactcctgtcgcttcgtcaccggccacctgcagcgcgacggtgccttgaaactgccgtgggccagcctggccgagccgagccagaccctggtgttctacatgggcctggcgaacctggcgctgatcgccgaacacctggtggcagccggtctgccggcggatacccccgcagcgctgatcagcaacggcgcccgcgccgaccagcacgtggcgcgcggcaccttgcgccagttgccaaccctggccgccgactgcgaaccgggcgtgcccaccctgacggtgatcggccatgtggtgaacctgttcgccgacgccaccctgcattaccccgccagcctgtcggcaccgcgcgtcccggtggcggtatgaaacacctgctgctggtgccgttgctctggatcagcgcggcccatggcacgccggccgaggattacagcaagtattgccagagctgtcacggcctcaaccgcatcggcgccagcggcccggcgttgctcccggaaagcctggggcgaatcaagccggacgaggtgcgcaaggtcatcgaacaaggccgtcccgccagccagatggtcgggttcggctcgcagttgagcgccgcacagatcgacggcctggcgaacttcctgcaacagccaccggccacgccggccacctggggcgcgcaggacatccgcaacagccaccgcctgctggcagatctgcgcacactgcccagcaccccgcagcaccacgccgacccgctcaacctgtttgtggtggtggagtccggtgaccatcacatcgacattctcgacggcgatcgcttcaccgtgctggaccgcttcgccagccacttcgccgtgcacggcgggccgaagttctcgccggacgggcgcttcgtctacttcgcttcccgcgacggttggatcagcctgtacgacctgcataacctcaccctgatcgccgagacccgcgtggccctcaacacccgcaacctggcggtgagcaaggatggccgctgggtgctggtgggcaactacctgccgggtaacctggcggtgctcgatgcgcgtgatctgtcgttggtcaagaccctggagacgggctcgcgggtcagcgcggtgtacaccgcaccgccgcgaaacagttttgtggtggcgctcaaggatgtgaatgaggtgtgggagctgtcctacgcggcggcgcaccccacgtttgaaccccggcgtatcccggcccacgatgtgctggacgacttctcgttcaccccggattaccgccagttgctcgccacctcacgcaaagccggtggcggccaggtgatcgacctggattcgggcacggtggtcactgacattccgctggcgggcatgccgcacctcggctccggcacttactggaagcgcgacggcaactgggtgttcgccaccccgaatatcagcctggggcaaatcaccgtgctcgacccgagcacctggacgctgatcaagcagatccccaccctcggcccgggcttcttcatgcgcagccatatcaactcgcgctacgtgtggagcgatgtgttcttcggcccggataacgacgccatccacctgatcgacaagcagaccctgcacatcgcccacaccctgcgcccagtgccgggcaagacggcggcccacgtggaattcacccgggacgggcgctacgtactgctgagtatctgggccaccgacggcgcgctgatcgtctacgacagccagaccctcaaggagatcaagcgcctgcccatgaacaagccatcgggcaagtacaacgtgggcaacaagatcgagtttgccgagggcacgtcccactagtttcggccaaacagacccaggccgatgcggctgcaatcaccgtgcagggtgaacccctcttcggtgcgccgcaatcgaccgcgctcctgggcctgggtcagctcatcatcgccacgggcaaactggccgaggcccaggtagtgataaccggctgcttccaggcgctcgacacacaacagccccatggcggtgctttgtgcggcgcagcacagcgcctgcgggcattgccccgcgtatcgcgccggtggccgggcatagtcgaatacctgcacgcggtcaggctccagcgcgatcaggctggccaacttcgcctccaggctggccagggtctgccaggcgttgccgtagcccagatcgacactgaccgaacggaacccgaaggtgcgcgccgcatcgatcaacgactggatcggtgccggatcgcgataggtgtcctgggagagagggtcctcggtacaggcatccggcacaccgatgcacacccggttgaaacccagttcgcgcaaccggccgacgctggcccaatcactgtgctggggcgccaggtcgatggcgtagtcgccgcggtcatgctcaaggaaatgcaagcgctcgcgcagccgctgcatctgcatctgcacatcgccaatgggcgctgccccacgccactggaagtgctcaaccggctggcgactgcccaggccgccaccgatcaggcgtatctgctgcgccaggctgcggcggtaaacggcactcggcgtacctggccagtgcagggtcactgccagtggacgctgccgttggcggctggtgcgcaaagcacgggcgacatcgagaggaatgacggtgtgcatggcgggctccggatccggcgacgatgcgccattgtccggtgcgacgccacggcgcaccttgatgtgcatcaaaggctttaccaactgaggtaaaacatgcccttggccagcagcacgatggcgaccatatgcccgaacaggctcagatggataaagcgcaggtaagccgcactcacccggccacggcgcatgcgcagcatcgtcagcagaaagtgcagcagcacactggcggcgaggatcagcttgagggtcaacaaggtgccgaacgacgaggcgaacggcgcggccaacaccggcaggtaacgcaacccgaccatgcccagcccggcgccgaacagcaccagcaacacccacggcatcagcgcccgggcacgcacgccgataccttgctcgacctgcagcatcacccgcgccggcaactgccgatgcagaccgcccaggatcagcacttcgaaaaacactgtgccgatgaagatcagcgcggcgaacagatgggccagcagaaacaacaggtaaagcatggtggcctcgcaggtggcgtcaaggtgccagtgtgacgccttgacgccacctgatccttgataccgatcaagctaaacccgcacgccgagcatgccggcagtgatgatcagcgtcaccagcgcaccgacgccgatcaccgcccacgtcatcgtcgcacaacgcgcctcgctcaccccatggttacgcagcacgccgcgcaggccacaccccaggtgcgcgatcaacaggaacaccgccagggaataatgcggcaccagccggatgctccaggcatcggccagcaaccccactggttcggccacggcccaggcgtaatcggtgtcggtgccgaagtagcgcgccagggtaaataccgagttgatatgggaggctataaacactgccaggtaagcgccagacgcggtctgcaaggcgtccagcaggtcggcgcggtggacggttttggggcggatcagcaccaggccgctgagtatctggaaaaagaacgtgacgataaggatcggctccagccaaccgttgcgatacaccacccgcagcacttgcatcaccgcacgatgcgcatcgttgccgaaaattccgagcagatggttgaacaggtgcggcgccaggaacaccatcaggatcgccaccgacgcaatgccatgggcgacccgcagcttgatgtaggtgcgcgggtggtgggtgaagtcaatgctgggcagcgtggccgacaccatcgagaagtaggcactcactgccaaccacaggccgctccacacgacaaggtcgtgaccattgaccttcatcaggtacagcagcacgcccatcagcgtataggctggcggcgtggcaacggccaggcaggccaggcgcctggcaagcaccaggcgtgcactcatcatgggctgcacacccgtgacgaacacgcagtagaacgccaccaccggcactgcataggcactcaacatcagcgccagagtcaccggcccgccggccccgccaacatgggccaggttgctccactgcagtgcccaggggtaatagagtgcggcggcgaatggcagcagccacagccagtccaatcgggtgtgggccagcggttttgcgagagacattgttgcgtccttactcatggattttcccccgcgaccctacggactggcgcgagggaaacccaggtccaattccacgctttttgcctacaccactgcgcgttacagcaacgggatgctgtagctgacaatcaaccgtgtctcgtccttgtccgccgtgtcattgccgcgcaataccgcactgcgccaggtaaaccccaggcctttcaaggccccggtggggatcacatagtccaggcgcaggtcgcgctcccattcgctgttgtcgcggccggcggtgcggatatggctgccgtgaatgtaagtcacactggagcgcagccccggtacgcccaggctggcaaagtcataggcataactgcctaccgcggcctgttcgccggcattcacgaacttgagcgactgggagttggtgatcaggtaaagcgaacggccctgcccctggttgatgtgcgggaagtcactttgcccggtggttttctggtagcccaggctcagcgaatgcccgctcaaaccataggtgaacagtacgctccacaagcggttgtcgacgttgccggtgttgacgccgggcgcgtagtaacccgagccgacataaccttcgccacggcccgaagcactgccgttcttaccgtcggcggtgctgtagaaataacgcaggtcgctcttgaactgccccaccggcagttgccaggtgtgcaccaggcccaggaagtgctgttggtagaagttctccaggctggcgtagtagtactgcatctgcagttgcttgctgacggtgtaatccacgccgccgtagtagaactggttactggacttgcccttgaccgggtcattggcgccggcaatcgacaggccttgggcattgctggagttgcggtccacgacctgctcgatcttgcccgcgatcaggttgacgtccttgaagtccttggactccacctgatagccacggaaggtctggggcaacaggcgcccgtcttcagtggtcagcaccggcagcctgggcatcaggctgccggccttgagttgggtctgggcaatgcgcagtttgccggtaacgcccgtcttgctgaagtcatgggcggccttgccatcgtccagcgggaagacgctgccgggggtgttatcggcaccggacttgccggcccggccggaggcgtccaggcgcaggccgtaccactcttgcaggtccaggcccaggccgaccgtgccttcggtgaaaccggactggtagttgaacataaaggcctggccccattccttgtccgaggcggccttggcgttgcgggtgtcctggttgtagtagaagttgcgcaggtcgaggctggctttgctgtcatcgataaaacccgacgcagccgcctgctgcgcagcgccgatagagacggcgagcgccaggcaagtcttgtggttcatgaaggctccgagaagtgattgaggcgccccgtcgcagcgctgtttttgttgtgcctgggggctgcagtcaacgggagcgcgcacggtatagcgttgcgtggccgggaaaaagccggcaaaaccgccaatcactttttcagtttgggtaacaatccagcgaatggcgagcgcgtgtccagcagtgaggtacggatgaagtgcaggtaactttccacccggcgcaaggccgaggtctcaaagtgcgcttcgaaaggttcgacggtgtcctgcacgcactcgatcgcgtgttcgacgcgtgccagtgcacgttgccaccgtgcatgccccggctgggtgaacaagcgcaccaatgcccgccccatggcacgtaccgcctggcgccacgcggtggtttcggcgtagcaggccagcgccggcaactgcgcctgctcgcggcgcagttcgatcagggcatggccgacgtcaagcaccacgaacgtccagcgcagcaggcggtgttgcacctggggctggccggcggacaagccatgggcctggttaagcaggtcacgggtgccgctttcgaaacccgagcccagcgccggcaagggtgcgtggagggcgaacacgacccgctggcgcaggtcctgttccaaccgacgccacaaccacgggctgttgggcggcagaatgatcgcccctgccgccgcgcacaccagcatcccgaacaccatggcgaggtagtcattgatcaagccataagggttgtagagcgtgagattgccgggcaccgaactggtgccgaaaaacaccagcatgcccaggccgtagcccgcccactgtggtttggccaaccaaaacgaccccagcatgatcaccggcgcaatcactaggcacagtaacgggaacccatcgatccggggatagacgaagaacacctcgaaaatcccgatgaccgccgccaacaccgtcccacaggcaatctggaacgacatgcgccgggggttgggggagaacgccgagagccccaccgtgagcgcggacaccagggtcatcgccgcgccactgggccaactggtagcgatccacagcgcacacaacaccagcagcaccactgcggcacgcaggccggcgcctaccgctgccagccagtgggtctgtggctgaaaaggctcggcccaacgctcacgccggtggctgtgatcggtcagggaagaatgggtctgggcgtagctgtacaactcgtcgacgaagcgataaagcaactcgcaggccgtgtgaaaatccagcaagtcatcgttgggcggatgcgccagcaacagctcggagcgcaggtggcgaacctggctcggcagcccgtggatgtaacgcttcaggtgtgtcgacaggtgcgccgcatccaggtctgtgagtacctggccggcgaagggttgcagcacactgaccagcgccctgagcgccgggtccaccgcgttcagcaccgccgtggcgccgcgcatctgcactcgatcgagcaactgatgcaggacattgaaacgcgtggtgatggccatgaactcgacgttgagccgatccaggcgccccttgcgtcggcgcatgtaagggtcttcgaacacactgacgctgcgcatcccttccaggcccactgcctcggcgatgaagcgcaggttggcgacctcgaacgccgcctggtcgtgggtactgcgcagaccgctcacgacaaatccggcgaaacgaccaaagcgttggtacagggtattgcgcatggcggcgcccgccgtattgggcagcaacgttgcgctgatcccggtggcgcacagcacgcccagggtgatctccaacacccgccacaccgccgccatgaacacctgctccgggtgccccaccaccggcaagcccaccatcaccgcggtataccccgccagcacccacccataggcgcgaaaatgacgattgcgcgccgcgccgtatgagcacacgcccacccacacggccaacccggccaggaacagctcggtgctctgggcgaacagcgccatcaacagcaccatgaacgacgaccccaccagcgtgccgatcacgcggtagacgcttttggccaggacatgcccgctgtagggctgcatcacaatgaataccgtggtgatcaccgtgctgggctgcggcaattccagacgcatcgaaagccacaaggccaggtacgaagcgatcagcaccttgaacaggtagacccacatcaccccgtcggtgcgcgcccattccaggaagccccggcgccagggcagtgctctcagccggcgtgaaaaatcagtgagtggcggcacgaaacagggactcccgacaagctggctggcacacaaggccggcgactttaggcagttgcgccagggtcggtaagtcatccagaacgtgaatgactgttacgcaaaacaccacaataaatagcgtttacagcggcccgcgacttcatgccacactggaaaaatccgttatccctggtagccatcgatggacattctgcagaacatgcgcatcttccgttgcgtcgccgaagccggcagttttaccggcgcggccgcgcggctcaacaccaacaccacccatgtatcccgctccatctccaacctggaagcacacctgcgcacgcgcctgttcaatcgcaccacgcgccgcatcgccctcaccgaatccggccaacgctatttggtgcgatgcgagcagatcctgcattcgatcgcggaagccgaggtagaagccggcgacgcccatacccggcctatcggccagctcaaggtgcattcgatgaccggcatcggccagcattacgtggtggacgccatcgcccgttatcgccagcattacccggatgtgaccttcaacctgagcatgagcaaccgcacgccggacctggtgcacgaaggcttcgacgtatcgatcgtgctggccatcgacctgcctgactccagccatgtgtcgcagaagctcggcagcacctacagcatcgtttgcgcatcaccgtcctacgtaaaaagccacggcatcgcgcaggttcccaaggacctgctcgaccacgcctgcctgcgcctggtcagcccggtgatccccctcgaggactggaccttcgacggccccaatggcaaggaaaacgtgatcatcagccactcgcccttcctggtggattcggttgacgcgatgaaaaccgccatcagcaatgacatgggcgtcggcatcctgcccgtgcatgcggcgatcaagggactgcgcagcggcagcctggtgcgcgtactgcccgagtaccgcctggaggagctgagcctgtacgccatctacccttcccggcattacctggacgcaaaaatcaaaacctgggtggagtacctgcgcagctccctgccggaggtgctcgccgaccataaggctgtgctgaagacccgcccgttgctcagcgctgtcgagtcataacgactacatagggtcataacgactacaggacgccagggtcataacgacaacaaaaatcgcaaccgactgattttcataatgttattcattggcatgctttctgactctgaagtgggcaggacaaatcttcgaaacccacagagagatcactatgagcaatgaattcaaccagcgcctcgccgtcgtcaccggtgccagttcaggcatcggcctggccgtcacccaacgtttgcttgagcgcggcgcgaaggtggtcgcgatgtcgcgtcaactgggcgggcttggcgtgttggccgagcagtttggcgagcagctcaagtggttggccggggatgtgaccgaggcagccgacctggcgcgcctggcgcaggtgacggcgccgatggggcctgtggatttgctggtgccgaacgcgggcattgcccaactggccgatggcctggacctggccgccttcgaccggcaatgggcggtcaatggcgccggcgccttgaacaccttgggcagcctgcgcgagcagttgtcggcgcaggcgtcggtggtgttcatcggcacgttcctggagcaagtgacctttcccggcctggccgcctacatcgcgtccaaagccgccctgcgcgcccaggtgcgcaccctggcggtggaactggcgccccacggcatccgcctgaacatggtctcccccggccccaccgccacgccgatctggagcaccctggggctcaatgatgaagccctgggttcggtggcgaagaccgtcaacgcccgcctgctcgacgggcagttcctggaaccgggcgccgtggccgatgtgatcctgttccagctgggccagggcgcacgcagcgtgttcggccaggactgggtggtggacggcggctataccttgcgctgatcagaccagtgcaggcatggccttggcacctccgaatgccagggccttccaaccgatcaccaacagcgacaacccggcaaagatcagcccgcagccaatcaccccggtggtgccgaaggcattgatgaacagcccgcccaccgatgacccgatcaccaccccggcattcgccgatgacacatacaggctggtggcgaactcatgcgcctcgggtgccgaagacgtgagccagacttgcgtgaccaccaggccacaggtatgcgccgcgccccagagcaacacgatcacactcatcgacgcccacgacaggctgccaaaggcatacaacaccaggtatgccgccgccagtaccaccggatacagtacggccgtcacaaccagatgccggctgagcgcacgccccacccataggttaccgacgacgccgccgatgccgaagaccaccagcatgacactgatggtccgaccgtccatgccgatccgggtcttgaggtactcagccgcgtagctgtacaccgaaaacatcgtggtaaacaccagcacggtggcgaggatcgccagccacaccgagaggctgcgcagcacagtcagttgcttgccgaagctcaggggtgccgaacgcgggtgatcgggcagcttgagccttagacccaacgccgccaccgccgttgccacggcgcaaaagtagaacgaggcctcataggaaagactcgcccccacccaagtggtcagaggcacgcccaacaccagcccaagcgtggtgcccaccaccgccagcgccgtggcatgggccgctcgttcgcgggggtacagcgacaccgccgtggaaaacgcagcagcaaaaaataccgggtggagcatggccggcaccacgcgcagcgccatcagtgtttcgaagttcggtgcaaacgccgacaacacactgctgatcgagaaccccagcaaggcgcccaccaggattttcttgcgcgccacccgcgaggccaacaacaccaggaacggccccagcaccgccacgatcaacgcaaacaaacccatcaaccacccggcctgagacacactgatcgcgaaccgctcgacgatcatcggcaagataccgaccaccccaaactccagggtatacaggccgaacaaccccaggatgatgtagatcacgagccgacctcgatcacaaccttaccgaaggcaccgcgctgcaaatgggcgaaggcctggggcacttcggcaaagcggtaggtgtggtcgatcaccggttcgagggtgtgtcgctccaccatgcgaaccaggtcttcgagggcacggcgtggccccaccgctacaccgacgatggcggcgcgcttggccagcaggctcatcagcggcgcgctcaactggtcgctctccagcaggccgatcactgagacacgcccaccgttgctcaccgcttgcagtgaacgcgccaggttgtcgccaccggccatttccagcacgtgctcggcgccgcgtccgccggtcagttccagcacggcgtggtgccagtccggcacccggccacggtggatgccatgggtggcgcccagttcgacggcacgggcgattttttcatcgctgctgctggtgataatcacacgggcaccatgggccgctgccagttgcacggcaaacagcgaaacgccgccggtgccctgcaccaccacggtctggccggcgtgcaagtggccgagttcgatcaaggccatccaggcggtcaatgccgccaccggcaaggtgctggcctgggtggcgttcaacgagcgtggtgcgagcacgcaccagtcagcgggggtggtcacgtattcggccagcatgccggggatcgggccgccttgcggtggcgcgtcggcccaggacaacggcctgccgtcgacccagccggcaaagaaactcgacagcaccttgtcgcccaccttgaaccggttcacaccctcacccacggccaccaccgtgcccgccatgtcggacgccggggtgaaggggaattgcaggctggcgcccatgccgttttccgctacctcggcgtcacggtaattgagcgataccgccgcgacgcgcaccagcacctccccggccttgaccaccggtcgcggcacacgggccaagcgcaaggtatggaggccaaaggtcgggatttcccagcgttgcatcaagtcagtcatgttcaggtctctcgtgagggttttgcgcaaggataagaacctcgcttcacgggattaagtagggcgcggctcctgggtctacggagctttcattccgcaataccggcaattgcgctagggtatcggcaattcccgtcgccaatcggtgcctcagatggacaacctcacgaccctgaatgcctttgtgcaggtcgcgcatacccacagttttgtcgccgccgggcgggtgctcggggtgacggcgtcggcggttggcaagagcgtggcgcgcctggaagaacgcctgggcgtccggttgttccaccgcagtacgcgcagcgtgacgctgactgccgagggcgagctgtttctggagcgcagccggcgcatcctgcgggaaatcgaggaagccgaggcagagttgtcccaagtcagccaggcgccccgtggtcgcctcaaggtcagcctgccgttggtgggccatccgtttttgccagtgctggccgacttcaagcaggcctaccctgacgtcgagctggacctgagcttcaccgaccgccgcgtggacgtggtggaagaaggctacgacgcggtgctgcgcagcggcgaggcgccggattcgcgcttgagttcacggttggtgggggagtatcggatgatcgtcgtggcggcccccacctacctcgaacgtcacggcacaccgcagcgcttcagcgacctggcccagcacagttgtatcctgttccgctttcccaataccggcaagttgcagcgttggccgttgcacgcacaaggcgtcgaactcgaccagcacctgccggcagcgatgatctgcaacaacctcgaggcccgggtatgttttgcactgcacggcattggtatcgcctacctgccggacttcgccatccgcgaggccctcgacagcgggcaattgctgcaggtgctgcctgactgcaccgagcacggcagcttccgcatgatgtggccgtcgagccggcacccgtcgccgaagttgcgggtgtttatcgactttctcaaggaacgcctgtttccctgatcaggcgttgtcgaaccgctgccgcgcctggcgaaattcatcgcccttctctaccacccaggtccatagcgggatcatgtgtaccagcagttccgtgcccaggctcgacagctcgtactcgaccctgggcggcacttcctggaagtcatggcgcagcaccagcccatcgcgctccaactggcgcaacgtacgggtcagcatgcgctgggtcacgccctgcatgcgccggccgatctcggcgtgacgcaagcggccggacacacccagcacgtgcacgatgcccaatgaccagcggttgcccgcgtgggtcagcacctcgcgcttgaggccgtcatcgtcggcgctgagggcgtcgcaggcggcttgggagcggcggatgatctcgtcgttatccatggggagctctcggtatcacgggtgtgccttcttatgcgcggcgatgaattctgcaagcatgccacgactttcaatccagacggagttcctatgaccccctcttccatcctggtactcggtgccggcgaactgggcatggccgtagtgcaagcactggccgacctggccgcaccgggcgaaacacgcctcgccgtgctgctacgccccgccagcctgcactcggctgcggccaacgctttgcgtgcgcggggtatcgagcccgttgccggtgacctgcagaacgacagccaaagcgtgctcgccgagcgcttcgcgcccttcgacacggtgatctgctgcaccggttttgccgccggccccggcacccagcgcaaactggcacgggccgccatcgagggtggagtgcggcgttacgtgccgtggcaattcggcgtggactatgacctgatcggccgtggcagcccgcaggataccttcgacgaacagctcgacgtacgcgacctgctgcgcgcccagcacggcacgcaatggctgatcatctccaccggcatgttcaccagttttctgttcgagccctcgttcggcgtggtcgacctggcgcagaacaccgtgcatgcgctgggcagttgggacaccgccgtcaccgtcaccacgcctgaggacatcggccggttaaccgcacacatcgtgcttgccgaaccggcgctgggcaaccaggtggtgttcactgccggtgacaccctgacctatgggcaactagccgataccgtcgacgccaccctcggcatccggctgcagcgcgagccctggccggtgccgaggttgctggccgaactggcgaaggaccccgatgacaacctgaagaaataccgcgcagtgttcgcccaaggccacggcgtggcctgggaccccgccgtgaccttcaacgcccgccatcacatcgccatgacggacgttgccacgtggatccgccaacacctcagggcaccggcaaccatccgctgaattcaccccggttgttcaatgggcaccaggcgaagtccttttgcgcgccgggcaatacctggggttcgaccgccgcgcacggtgcccctttccaatcaaacagggttgcgccctgccaggccaggaccacacccctggcctggcttttatccgtctgcacccaacgtgcggcagccgccgccatgaacgcctcgatgggttcgtcatcgatctgcgcccgatactccgagcccagcagccagcggcagacgttcacgtggtaggtccaatccagcggcggccggtggcgataggcccaggtcatgaagctgcgaaacaggttcaggccctcgggcgggtccagcttgagcagcgccgggcagatgtcgaacagggtgtgccaatacggcagcaggcgtgcatccaggtgcacgaaactgcgggaattgctggggtattcaggcggcgccggttccgcgtgcaggcggcgggacgccttgctgaccaggcggcgggcgcctgcgggcaacaggtggttcatgaaacgcactcacagtcatgacgatgggacgcctcctggtttcaggaagcccaaggcaaacgtcagcgtgcaggggaagcgcgagggttggccgagggccaggaatagcgtggcggcgccttgttgcgccgttcatgggccgggcgcggggcgtgtcccaggcccaatagccaggccaggccgaccaggaacaccagggcaacggtcaatgcgttgcagaccgggcaggcaaagtagttcgagatgttgctggaagacgggctgcccaaccctttgtcggaaagtggcgcctggttgccgctcaccgaacagaacgccccgccgatgccattgagcgcctgccccgtcatctgcccatgccccaaaccgcagacgaacaggttcatgagcacgcagaagtacagggcccaggcgatcagcgaacggtcggggtggctcgatttcatggcggcgactctaccaccagcgccgcaaaaggatgaagcgcgacatgcccctgtggcagaacgtcgcagattacgtgggcttcccagggttggtagactgggcgccctcaaagcctgacgtattgatccagagcaatgcaggcgcttcacaggatgcacagttgatgagtacgttattcacccgccgcaaggtgctgaccggtatgggcctgttgggcctgggcagcctgctgggcggctgtgactacagccccaagctgaacttcaagtacggcaaggacctgagcgacaagatcatgggccgcaccttcaagctcaagaacaccgacggcgaaaccgtcaccctgagctcgttccggggcctgatgccggtggtgttcttcggtttcacccagtgcccggccgtgtgcccgaccaccctggcgcgcgccgcccaggccaagaagctgatgggccgcgacggcgaaatcatgcaggtggtgttcatcaccctcgacccggaacgcgacacgccggagattctcgacaagtacgtcaaggccttcgaccccagcttcgaagcgctgtacggcaccccggaagaaatcgccgtggccgccaaggaattcgggatcttctatgaaaagatccccgccggcgacacctacaccctgtcccacaccgccaccagtttcgtgttcgacacccgtggcaacctgcgcctgggcctgcaggcatcccttaccgctaaagagtgcgcagaagacctgctcaccgtcatggaggtctgctaatgactgccgttcaacacctcaagcgcacccttatcggcatgaccctgctgggcctcgccgcgcacgccagcgcccaggtgcaagtcaccgacgcctgggtacgtgcgactgtgccaggccagccgtccagcggcgcgttcatgaccgtcaccgccgacagcgacagccaattgctgagcgtggcctcgccggtggccaaggacgtgcagatccatgaaatgagcatgaaggacgacgtgatgcgcatgggcccggtggactcggtggccctgccggcaggcaaggccgtgaccctcgaccccgacggttaccacgtgatgctgatgggcctgaccggccagatcaaggaaggcgaccaggtgccgctgaccctgaccgtgcagaacgccaagggcgagaagcaggcgattgaagtgaaggcgccggtacgtggcctggatgggatggaccatggcaagatgcactgagacgtgcgcacccgcctcaatccacgataaatagccttgccccggcactcgtcgaagatcgatgcccttccatgtcattgcccacctggtaactcatcccggccgtcagcgtaaactgacggccgtcttccagttctgtgtgcaactcgccttcaaggcataacagcacatgcccccgccagcaccaatggtccgccaagtagccaggcgtgtattcgaccatgcgcacacgtgttgtgccgaagtggcaggtgcgccacagggcattgccagtgatacctgggtgaatcaccggttcgaccgtggcccagtctgtggtgccaaaaggaacagcagtgagatccatggcgagctctcgcgttgattgatgtgacttgaggctattcacaagacacggtggacggtagacacagatcgacccgttttacgggatacaggtatcctgcccgcacagagctcacggacacgctgatgcatatcgaccctgcctacatccttcacgaaaccgaacactggcggctcaaccatcatctggcatctgcgttgcccggctacctgatgctggggggcaaggcgccggtccactccctggctgacatgccggaaccggcgctggccgagttgggcgggctgctggcgaaggtccagcgggtaatggaggcgcagttggagccgaaatggctgtatatcagccggtatgggcacatgccgggcttcccgctgcatttccatttcatcccggtgtatgactgggtggaggatgcgttctggcgggatgagcgctatcggctgttacaacgctttggcactgcgcagctggcgcagaccgatggggccgagttgaccctgtttgtctggcgggagtttggcgagagcactacgcccccgtcgatccagggggcgtcagtcgagcaggtgattgctcgactgggcgcggctttcagggcactgtaaccgtcctcggctttgccacacgtccacagcatcctttgctcgcggggtggcacgtgttatctccagcatttcccactccttccatgaaatcatcgtgccattagcacacttgtgctaatcgacccctcccccctgcggcgctatattccccggcacttccaacgttccccaggcaccgtgcaactattgcgcgtgggcgtgttgtgcgctggaaaaaccataacaaccccaaggaagaagcaccatgaaactgcaatcctccgttacccgcctcaccctgttgggcgccctgatcatcggcgtggccggctgcagcaacatcaagcccaccgaagatcacctcaagacgctgtcggagaccaacctgggcgaaccggtcaagcgtatttccaatgtgcgcagcgactcgatgaccacctactacgtcgccagtgccgcctccggcgagtacaactgctcggtgcccagcggtgccagcggcggcatgttcgccgtggccagctttggcatgatgaaacctgcggcctactgccaacccaaaggtgcacgcggcaacccgctgcagggcttcacccagtaaccgtctgctggctcaggtcgcgcaaggtcccgcgcagttcggcgggacgcaccggcttggagagaatggcgatctgacggtcgtgcaaggcggcctggattctctccacgtcgtgcccggtgagaatcagcgcagggacgccccagccgcgttgctcgcgcagggcatcgatgcattcgatacccgtggcgtggttgcccaggtcatagtcggcgacgatgatgtcgcaatcgctgaccagatcacgccccgaagactcggcctgcaccgcgcaaccccagcgctccagcagggcctgggtggcgagcaggacgttatggtcatcttccaccaggcacaccttcaacccggtcaacagcccggcctggcgtgtgtcgtcgcgcggtgccgtggcgcgtggcgcggtggccagggtcaagccatacaggcttacagaagtaccatggcccacccgagagcgcaggcctacttgcacccccatcaactgccccaggcgcttgacgatggacagccccaggccgacgccttcgacgtccttgtcacgcaggtggcgtacccgatagaactcctcgaagacctttgacagatgctcctcggcaatccctcgcccccggtcatgaatctccaccgccaagccgccgtcgcgaatgcgcacgccgatcagcacaggtcgttgcgcgccatatttgaagcagttggacaacacgttctgcaccatggtcgccagcagcgcagggtcgaccagcacccaatgcgtgcagggtcgcaggcgcagctccaccccggcccagcgcgcggcctcggcgttctggcgcaccaggtcggcaaggaactcgcccagatgcaccgcctggtacttgggcagcaggcgaccgttgtcgagggtgtagagatcgagaatcgagcggaacaattgcgatacgttgagcagcgaacggtcgatgttatccaccaggcgccgctcttcatcacccagccgggcttcgcgcaggcaggcggtgaacaggccgatggaatggatgggttggcgcaggtcatggctggcctgggcaaggaaacgggatttctccaggttggcggcgatggcctgctcggaggccttgcgcgtgcgctccagcaggatatgcgcgtacaccgggatcaccgtgctggtgatcatcaacatcagcaccatgaagggttgcgcctgccacaccggcgtcagccgatacacgatcagcagtgccagcaaggccagcgccgtggcaatcgccaggtagcgcgagccgtagcgcatgccgttgcccaggttgacccacaccatcaccgcatacaacggcaacgccgcttcaccgcctaccaccatgccgaacgaggtgccggtgtagtcgtggatcatgccgaagatccgccgcgccgggtaatgccccggccagcgcacgatgacttggcgcaaggcaatggaggcgagcaggaacaggaagatatacaggatcaccggcaggtaggtgtccaccgactgtcccggcaggaagcccaatgcaccgatgtagacgattgcaatgctggcgaccacgatacgcagattggcctggtcgagttcggagttggtctcaagactcatggggttacgtccttgtgcggcaatcatcaattccttcacgcaccgcaggcaggcccgaggcacggtggtaaggtagcatgcaacggcacaaccttgccccagggaggagcaccccatgaccggccgtatcatcatcgccgatgaccacccgatgttccgcgaaggcatgctgcgcaccgtgcagcgcctgctgccggacgcgttggtgcaggaagccggcgacctcgacggtgtgctcgcgctgatccacgaaggcggcgagatcgacacgctgatcctcgacctgcgcttccccggcctgacctgcatgagccaactggccgaactgcgccagcaattgcggcgcaccacgctgatcgtggtgtcgatggtggacgacccggcgctgatcgatcaggtcatggccctgggcgcggacggcttcatcggcaagaacatcgcccccgacgagatcggccaggcgctgctggcgatccgcgaaggtgaagtgctggtcaagttcaccccctccggcctgctgccactggacacccataccctcaccgcccgccagcaagacgtgctgcgtctgatcgcccagggcaagaccaacaaggaaatcgccaaggccctggatatctcgccgtttaccgtgcgcatccatgtgtcgtcgctgctgcgtacgctaggtgtgccctcgcgggcggcggccgccgtgaagtatgccggagagttccagtgacaagccgtgcgtgagcccctctgcatccgatatttatgctcacttcccagcttaataatattttatttataccccccctccccctagccttgaagtcatgccaacgctgaatccaactgcattacgcaaggacagagacatgactgaagcactcacaaaaacagacacgctggtggtgggcgccggccaagctggcgtggccatgagcgagcatctgagcaaacaaggcgtgccccacctggtactggagcgcagccgcatcgccgagcgctggcgcaccggccggtgggattcgctggtggccaacggcccggcgtggcatgaccgctttcccggcctggcattcgataccgtcgccccggacgggtttgcgcctaaggagcgcgtggccgattactttgaagcctacgcgcgcaagttcaacgcgccgatccgtaccggcgtcgaggtgctgtcggtggtacgcaatgtcggtcgccccggcttcaccgtgcacaccagtgaaggggtgatcgaagccaaccgcgtggtggccgcgaccgggccgttccagaagccggtgattccggccatcgcaccaaaagaccctgcgctgcatcagatccactccgccgagtaccgcaaccccgcgcaactgccggcgggtgccgtgctggtggtgggcgctggctcatccggcgtacagattgccgatgaattgcagcgctccgggcgccaggtgtacctctcggtcggcgcccacgaccgtccgccccgcgcgtaccgcaaccgcgacttctgctggtggctgggggtactgggcgagtgggaccaggccgcgatgaagcccggccgcgagcacgtgaccattgccgtcagcggcgcacacggcggcaagaccatcgacttccgcgagctggcccaacaaggcatgaccctggtgggcctgacccaggcgttcaagggcagcgtcgccacgttccagccgaacctggtggaaaacctggcacgcggcgatgagaactacctggccctgctggatgccgccgatgcctacatcgaacgcaacggcctggacctgccccttgagcccgaagcccgtcgcgtcttccccgatgcggactgcatcaagaacccgctcctgcaactggacctggccaaggccggcgtcacctcgatcatctgggccaccggttttgccgtggactacagctggttgaaagtcgcagccttcgacgaagccggcaagccccagcaccaacgcggcgtggccagcgaagccgggatctacttcctcgggttgccttggcaatcgcgccggggttcgtcgttcatctggggcgtctggcacgacgccaagtacgtcgccgaccacattgccatccagcgccaataccttgaataccgcgaagccgccccggtggttcgcccatcccctgtcaacgcctgagccttattgccggagttttcctgatgcctactcacacccgtatccgcatgttcaacacgaaagaaacctaccccaaccagagcctcgacaacgacctgtgccaggccgtgcgcgccggcaacaccgtgtacgtgcgcggccaggtcggcaccgatttcgacggcaacctgatcggcctcggcgacccacgcgcccaggccgagcaagcgatgaaaaacgtcaagcaactgctggaggaagccggcagcgacctcagccacatcgtcaagaccaccacctacctgatcgacccgcgctaccgcgagccggtgtaccaggaagtcggcaagtggctcaagggtgtgttcccgatctccaccgggctggtggtgtcggccctcggccagccgcagtggctgatggaaatcgatgtgatcgccgttattcccgagtaaggagccgcacatgaccttttcgatcgtcggccgctgtgccgaaaccgggcaactgggcatcgccatcagctcctcgagcattgccgtgggcgcccgctgcccgtggctgcgcccaggcgtgggtgccgtgtcgacccagaacatcacgctgccggccctgggcccggacgtgctcgacctgctggaacaaggactggcccccgccgaggccatcgacacggccctgacccgcaacggctacagccaataccggcaactgacggcgattgatcacctgggccgcaccgtgcatttcagcggcagcgaaaccctcggcacacaccacgcggtatcaggtgagcagtgcgtggcggcgggcaacatgctggccgaccgcgcggtgatcgaggcgatggtcactgctttcgagcaaggtgaaggccaactggccgaccgactgctgacggccatgcacgccgcgattgccgccggcggcgaagccggcccggtgcattccgctgcgctggtggtggtgggcgaattgacctggccgatcatcaacctgcgcgtggattgggccgatgaacaaccgatcctcgcactgcaaacactctgggacgcctaccgtccgcaggtgcaggactacatcgaccgcgccctcgccccggaccgttcgcccggctacggcgtggccggagatgaccgatgagcaccagccgcgaactgctgcaatcgctggttgcgttcgacaccaccagccgtgaatccaacctgcaactgatcgagttcgtgcgcgattacctggccggtttcggggtggccagcgagttggtctacaacctggaacgcagcaaggccaacctgtttgccagcgtcggcccggtggaattgcccggcattgtgctgtcggggcataccgatgtagtgccggtggacggccagccctggacggtgccgccgttcgagttgaccgaacgcgacggcaagctgtttggccgcggcaccgccgacatgaagggctatatcgcctgcgtgctggcgctggtgccggcgttggtcgccgcaccgctgcgggtgccggtgcacatcgccctgtcctatgacgaagaagtcggttgcctgggcgtgcgttcgttgcttgcagtgttggagcaacgcccggtcaaacccatgctgtgcatcatcggcgaacccaccgaactcaagccggtgctcgggcacaagggcaagctggcgatgcgttgcgatgtacatggcgaggcgtgtcactcggcctatgcgccctatggcgtaaacgcgatagaacatgccgccgagttgatcggtgaactggggcggatggggcagcgactgcgcgatacccaggatgagcggtttgacccgccgttcagcacggtgcagaccggggtgatcagtggcggcaaggccctcaacatcgtgccggcggattgccggtttgatttcgaagtgcgcgcgttgccgtcgcaagacccgtccgaggtggcggacgaattgaaggcgtacgccgagcagcaggtgctgccgcgtatgcaggcagtgagtgcgcagagtgcgattcggtttaccgagctgtcggcgtaccccggcttggtcaccgacgagcgcagccaggcggcgcagtggattgcggcgttttccggctcgaaggaattcgggacggtggcgtttgggaccgaaggcgggttgtttgatgcagtgggcattcccacggtggtgtgcgggccgggcagcatggaccaggggcataagccggatgagtttgtgacggtggagcaactggcggggtgtgatgcgatgttggggcggatgttggcgtctgttcgcgcttgagcacttgggttcatgcagagcctggtaagcgcttgattttgtagtgagcgggcttgccccgcgcgaggcaagttcgctcactacaaaagcaaggcatgcctggatttagccaaggattcgggcgagttcttcttggcagtaatcgacaaacagctgcaccggcttggtcagcggcgcgcggcgcagccataccgccgacaggccggaaccagtgacggtctcggccaacggcacacacacgaccttttgcccgtcataggtgtactcggtgaacggcttggtcaccagaatcgaaaacccgaaccccctccccaccatgccccgcaccatttcgatcgacggcgagctgaacacgatattcggcgtcagcccgcgttcttcaaagatgctcacgaagtaggtgcggctgggcagcacgtccagcaggatcatcggttccagcaccaggtctgccagcgacaccttggcctgttgcgcaaagcgatgatcggccggcaacaacgcatagggctgctgcggcggcatcagcggcgtggtctcgatagtcgcgcccaggtcgtgctcgaacagcatggccacgtcgatactgcccgccgtcagcgcctgcaccagctcctgttgttcgccatcgcggatacggatttccacccccggccaacgcgccttgaagccggcgatcaggcgcggcaggtacagcggcgccacggtttcgaagcagccgatatcgatctgccccgccaccacgtcattgtccgccagggcgttctgctcgaactcgtgggccacccgcagcagctccagcgccttgcggtaaaagcgtgcgccgctgggtgtcagcgacacgccctgggcgtgatgacggataaacagctgcacgccaaagctgtcttccagctgcttgatcgccgtggataccgacggctgcgcgatatacagcttgcgcgacgcctcggcgacgctgccgcactcggcggtggtgacgaaatatctgagctggcgcaggttgtaggcagccatcgggacctccagaaacgtgggacttcgcccgtcaatcaggtgtaggcaacatacccgagcgcgacaagacgcgagctatattttttaaggtctatagcaacaaacttactaatttacctccccgcgcccattgcagatgatcactccaacaacaaagcgccgcgcaggtggcgcacagcgaagtacgtcaacgtactcaccttgccttggagctcgtcatggttaccactgcaacatcctccgccccgcttatcgaaaaacacacgattggatacgtgcccccggaagaccgccatggaaaggtcagagacctgttcaccctgtggttcggcggcaacatcgcgccgttgccgatcgtcacgggggcgctgggtgtgcaactgttccacctcaacctgctctggggcatcgtcgcgatcctcgttggccacctggtcggcggcgtgttgatggcgttgcactcggcccagggcccgcagatgggcatcccgcaaatgattcagagccgtgcccagttcggctcactcggcgcactgctggtggtggtgattgccggcgtgatgtacgtcggctttttcgcctccaacatcgtgctggcgggcaagtccctgcacggcgtggtcgacgccgtgcccgtgccggtgggcatcgtgatcggcgccatcggctccggcatcatcggcatcatcggctaccgcttcatccacgtactcaaccgcatcggcacctgggtgctgggcgccgggatcgtgctggggttcggctatatcttcacccacgtacagaccaccgacttcctgacccgtggtgaattcaacatctccggttggctggcgaccgtgtccctggcggcgctgtggcaaatcgcattcgcgccctacgtctccgactactcgcgctacctgccggccgacgtgccggtcgcctccaccttctggaccacctacctcggctcggccttgggctccagcctgtcgttcatcttcggcgccgtcgcggtgctcgccaccccggtcggcatggacaccatggacgccgtcaaactcgccaccggcgccatcggcccgttgatgctggtgctgtttctgctcagcgtgatcagccacaacgcactcaatttgtatggtgccgtgctgtcgatcatcaccctggtgcagacctttgcataccgctggattcccaccgccaaaagccgcgcggtgatctcgatcctggtgttggcggcctgtgcgattgccgcggtgtttgcctccaaggacttcatcggccacttcgtcgacatggtgctggtgctactggtggtactggtgccgtggacggcgatcaacctgatcgacttctatgcgatccacaaaggccagtacgacatcgcctcgatcttccgcgtggacggcgggatttacgggcgatacaacccacaggcattgctggcgtatgcagtggggatcgtggtgcagattccgttcatgaacacgccgctgtatgtcggaccgatttcggcgcatatcaacggggcggacctgtcctgggtggtggggttggtggtgacgtcgccgttgtacttctggttggcgagtcgggacagtgcgtataagcggcggatggacggagggaagttggtgggtggggtttgatgcactccctgtgagctgagtgatgaagtcattgtggcgagcgggcttggcccgcgttgggctgcgcagcggccccagtaaggttgaatgcggtgtgccaggcaggtctcctgtgctgaatttggggctgcttcgcagcccaacgcggggcaagcccgctcgccacaacagcctgctcgccacaggggatctgtgtcgctcgggtcgatgtttgtctatcatgtggcctctcgttcaatgcctcaggaaacgcccatgcccgccctcaccttgcgcaacgccctccccgccgacgccgcccgttgctttgaaatcgagaccaccgcctacgaaggcgacgaggccgccaccctggaaaagatcgccacgcgtattgcgcagtacccgcaaggttttctgatcctggaagcggctggcgaagtggtgggtttcatcaacggcggctgcgcccacaaggtggtgatgtcagatgaagcgttcaaggagttggtgggccactcggccgacgcgccgaatgtggtgatcatgtcggtggtggtcgacccggcgcaccagggcaagggttactcaaaaacgttgatgaccgagtttgtgcagcgcatgcgcggcatgggcaagcagacgattcatctgatgtgcaaggaacagcatgtggcgctgtatgagcgcatgggttaccagtatgtgcagccgtcgccgtcggatcacggtggcatggcgtggcatgagatggtgatggtgttctagccacccgggtcaaggcggcacttgtgtgtccggacgcaagcgcttgcaacacacatcgacaacgaccagccacgccacatccccctggatgacaccgccggggatgatgccgaagtgttcgaccccaatacgcaaagctggcaacccacccaggcggcgggcaaagggcaatatacgccgctgggagatccgtaccgcgaaccaatagattttgagatcaaggccgataacatgggaggatggcaacgcgcataagccagacgagaacccgtgatgacagccctccacattgaagtcagcgaccagcccaaccccgacgccgagcgtgtcctcggcgccggcttggcggcgttcaatgaggccatcacggggtataacgaccggcgcttgctggcggtgctgatcaaggatcccgacacccggcaaatccttggcggcatcaccggcaaaaccaccctgggcacggcgtttctcgatctgtttcatctgcccgacaccctgcgcggggcgggtcttggcagtcagttgctgcacgcctttgaagatgaagcccggcgccgcggctgtcgccacgcagtgctgtacaccctcagttttcaagcgccgggtttttacgagaagcacggctgggtgcgctttggtgagattccatgcgaaccggacggcagcagccgggtgtttctgtctaaggcgctgtgatgttttaccagctccctgacgccccgccgccgccactggaaccaccgccgcccgatgaactgctgctggaactggaacgggagcttccggagcttgagccggaacctccgccagaccccgagccgccctcggaaatactctggataaacacaataaacgccatgatcgacgcggccggtatcgccactatccagccctggtaaccctgccccagcaacacccccacggccacatagaccgccagcaccgccaacacacgtaacatgaaaaagcgcgggcgttttttccaggattcacggatgacgaaaaacagccccacgtataaccccagtaccaaggcgccgccaaacggccacaccagccaatggacgaaattgacctcgacgaagtggttcaccaccagcaccccgacgatgtacgccagcagccccaacacgctgtagaacaccccacgcgccagccacagtgagccgaacgtggcgccgccgatcagcaacgtcagcggcactacaaacaggtacatcggccaatcgcgcccgccgccatagatcgtcaggagtactgtcaccaccgcggtggcaatcaacgcgcggcgccaatgcagcttgccggcggcgatgagcacaccgccgatagcgccgatgacaaacgccagcagtatcgcaatgaactgcggattgagccccggccccgcaatcgcgggcaagtcaccaccgtccaccagcaccaccaggtcgttcacgccctgggagacgccgcccacaaaatcgccctggcgaaacgccggggtgatgtgctcttcgatgatgcgatgggccaacaggtcggtcactgtgccttccaggccatagcccacctcgatgcgcaccttgcgatcatccttggccaccaccagcaggatgccgtcgttgatgtccttacgccccagcttccaggcacggaacagttggttggcgtagtcctcgatactcgcaccacccgtggtgggcacgagcagcagcgcaatttgcgcgcctttgcgctgttccaggtcggtgagctgttttttcagacgggtggcagtggcggcgtccagcgtgttggtgaggtcgatcacccgctggtcgagggccacgccgatgggcgaatcctgcgcatgggccgcgctcaacacgccgataagcagcagtgccaccaggcccaggatcgattgccgcaaaatcgccatcatgctttgttacctgaagtttcttcctgaaggcgccgactttaccttatcaacgctataacgcgtgaccccacggcgttgactatctaaactgaccgtatacatagcaatacgccataaccgggaaatccatggatctacgtcagcgcaacaacgtcaatgtgatgggcaccggcacgtcgaccctggtgttctcccatggttttggctgcaaccaggccatgtggaactacctggcgccgcatttcctcgagcgttttcgtgtggtgctgtacgacctggtgggcgccggcctgtctgacctgagcgcgtacgacaaagacacatacagcacgctggacggctatgcccgggacctcaatcagattatcgatgcccatgccatcggcccggtgattctggtaggccactcggtcagcgcgatgatcggcaccctcgccgaccgccaggccccggggcgtatcgccgcccacgtgatgatcggcccgtcgccgcgctatatcgatgacgacggctatgtcggtggtttcaaacgcagcgatatcgacgacctgctcgacaccctcgacagcaacttcctcggctggtccagcgccatggccccggtgatcatgggcgcgcctgatcaacccgcattgggcgaagagctgaccaagagcttctgccgcaccgaaccggatatcgccaagcagttcgcacgggtgacctttatgtcggacaaccgccaggatgtgatcggcctgaccatcccggtgctgatcctacagtcgaccgatgacctgatcgccccggtggctgtcggcgaatacctgcacagcatgttgcccaacagcacctatcacttggtggacaacgtcggccattgcccgcacatgagtgccccccaggcttgcgcggcggccatggacagcttccttgcgccgtggacaactgcacgtgccagctgatctgttcgacagcgccgcctgcgccctggccgtcacctcggaagatggcaccctggtgcaaaccaacgcacgcttcagcgaatggctgggcttcagcgccgccgagttgtgcagcaagcgcttccaggaccagctgaccatgggcggccggatttttcaccagacccacctggcgcccatgttgcgcatgcatggcagtgtcaacgaggtgaagctggacatgctgcaccgtgacggccacaagatcaccgtgctgctcaacggcaacaagcgcgagcaggccgacgtcgcggtgtacgacctggccctgttcggcaccaccgaccgcgacaagtacgaacgcgagctgctcaacgcacgcaacctggccgaagcgctgttgcaggagaaaaccgccaccgaactggccttgcagcaagcccaggccgagttgcgcgaggcctatgcgatttcccagcgccgcgcattgttcgccgagcagatggtggcgattgtcagccatgacctgaagaacccgctcaccgccatccgcatggcctctgactttctcagccgcagtgaacgcacggccaaggaacgccagttgctggggcatatcggccagtcgtccgagcgcgcccaacgcatgatcgccgacctgctggacttcacccaggcccgggtcggccagggcatcactatcaaggccctgccgttggacttgcatggcgtgattcatcgcaccgtggacgaactgcgcgtggcgtttcccaaggcgacgttggaacatcacgcagaaggccatggcgacgcctgcctggatgccgaccgcgtgcagcagatcatcggcaacctggtggccaacagcgtggcctatggcgacctgcaacgaccgatccggattacctcacgcctgggcgttggcggctgcgaagtggcggtacacaaccacggcgcggccattcccgaagcgttgctggccgggctgttcgaacccatgacccgaggtaccgaccagggcagtgatgtgcgcagcgtgggcctgggcctgtatatcgtgcgcgagttggccagggtgcacggcggggacgtgacggtgagttcctgtgctaccggcggcactacctttaccgtgacgtttcagagtacgtaggcgctgccttgcatcaccggctcgacactgccggtcagcaccacaccgccctcacccgcccagtgcacggtcacgatgccgccgtcgcactccacctgcaccgtggcatccagcaacccgcgccggatcccattgaccaccgcgccgcagcagcacgagccggagcccagcggcacgccgccgccacgttcccagatgcgcaggcgaatacggccgcggtcgagcacctgcacgaaatgcacattggtcttgtccgggaacaaccgatgtttttccagcccagggccaacggcggcgatgtcgattgcgctgaggtcatccacgaaaaacgtacagtgcgggttgcccatgctgcacgcggccgggccaccctcgataggcaacacacacgtgtccatggcctcggccagcggcactgcatgccagtccagcgacggctcgcccatgttcaccgagacttgccgcccgggggcacgtacgcaggtcagcaggccccggtcggtacgcaacagcaccgaatccgtagcagcctcatgcatcaagcgatcagccacgccacgggtcgcgctgccgcaggtggccagcggcgtaccgttggggttccagaacttgatgcgcgcggcggcatcatcgcagtcgagtaccacggcaagctggttgaaaccgataccggtgtgacggtcgcccaggcggcgggcgatctgcgcggtgatggggtcgtgcaagccacggcgatcgatgatgatgaagtcatcgccatgggcgtgcattttcacgaacggcaaaagcatcggttgtcctgtggtcgacctgtgggggaactgaaggatactctgaaccggcccactcttatgagacccacctatgctaattgtcttcagtggcctgcccggcaccggcaaaaccacgattgcccgcgaactcgcacgccagaccgcggcggtttacctgcgtatcgacttgattgaacaggctatacgcgaggccggtgtgctggcaggggacgtgggtgccagcggttatggcgtggcgaatgcactggcgctgagcagtctgcaactgggccacaccgtggtggcggactgcgtaaatccggtcagggaaagccggcaagcgtggaaggccgtcgctgcagcagcaaaggtggcattactgaatgttcgggtgatctgctcagaccagcaggaacatcaacgacgggtggaaacccgcacgggggatattcccggcctggttccgccctcctgggcgtctgtgttggcgcatgagtatgaggtttgggatgaagtgcccttgacgctcgataccgcctgcatgacaccggagcaagccgtgacaacaacgatggcgaacctcacctctgtggcgagcgggcttgccccgcgttgggctgcgcagcagccccggtaagcccctgcatttcccctgtcagaacgcattgcctggtttcagggccgcttcgcgccccaacgcggggcaagcccgctcgccacaacaggcctgctcgccacgaggttgagccgcctacaacacgctgcccatcgccttcatcaacaccaggtcccgcccatagatatccggcgcatacaccaaaccgccctcacgattgacctccaccgtccagtagctcaacaacaccggcaccggcgtggccagcctgaattcgtgggtcacgccggtggccagcagttcatcggtgcgcgcacgttcggccgggctcaccagcagatcgcgcaagagcagcggttgctcgacccgcacacaccccgaactgaacgcccgtggccctttggtgaacagcggctggctcggcgtgtcgtgcaggtacaccgagtacgggttgggaaagcgcatcacgatcttgcccagcgggttgcgcgggccggcctcctggcgcagcaggatattaccggggcgcgcccagtcgatctgttccggcgccagcgggtggccttcggcatcgagcacttgcaggttctgctggcgcaggtattcggggttgaggcggatggccgggagtttgtcctcgcgcatgatggtgggcgggatggtccaggtggggttgagggtcagccgggtgatgcgggatttgagcaacggcgtctggcgctcggcgcggcccacttgcaggcgggtctgccacaccgggatgccgctctggtacacgctgagttgcgcggcggcgacgttgaccagcacgccttcaggctccaggtcctgggccaaccagcggaagcgttcgaggttgatgcgcagttgttcgcgccggatcgccgggctgatattcagctcggccaccgtaccggcgccgatcacgccgtcagcctgcaacgaatggctcagttgaaaggccttgaccgccttgaccagttcgtcgctgtactgcttgccgccgggggccttggccaggtaacccccaccgatcaggcgccgcgccagttccggtacgcgcgggtcgtccatgccggggcgcaacagcgggccgttggcgaccgggtcccaatgtggcaatggttgctggcgcacagtggaataggcattgcgcaggctgcggtagaggtccgcgctggggcgtgcctgatcgaacgcctggggcatgtcctgcaggccggtggcggcaaaggccagcacttcaacgttggcgtcgcgggtcggtggctgggaatgccacaggggctcgaagcgcgattgctgcaggcgcccgtagtgcagatcctgcagggcttgcaagtagtgctggctggtcgcgatgtcgctgcacagcacgttggccgtggcatctggcacaggcaggctatagtgggtggggtccaggccgtcatcggcgagcatcagcaactgagattgcagggcttgccggcgctcgtcggcggaccacaacggcagattcccctgctgttggtagaacgcttgcagacgcagttgggcggcggcgtcaatctgcggcgccaagccggggcaaacgctcggcaattgcgccaaggcctgctgcaccggcgccagatcgaccggcgcaggtgttgtcaccggcaacggctcgaccggcagcgcgtcggctgtcgcgaccaatggtgcaacgagcaggcaaatgctcaagtaacatgcgtgttttttgaacaattgacctggctccaatccacaccgggggatactttgtagatgctgacttttatgcgccgcctcggcttgatctccgtgacgctggctacgctgagcaattttgcgctcgccgctaatcagacctctcctaacttgtatagcagcctggcgcgctcggctccagaactcaatcccactgtactcaaaagcgccctcaacgcggtgcagtgcgcggtcaataacggcgaggaacgctccgaacgcctggcggtcattgactactcccagccttcgaccgcccgtcggctatggatcttcgatttgcgcaagaagacccttgttctgcgcgacctggtggcccacggcgccaagtccggggaaaacttcgccacccagttctccaacctcgaaggcagccaccagtccagcctgggcttgttccgcacccaggaaagctacctgggcacccacggttactcgttgcgcatggacggcctggagccgggtttcaatgaccaggcccgcgaccgcgccatcgtgatccacgccgccgactacgtaagccccctgtggagcaagcgcgaaggccgtatcggtcgcagccagggttgcccggccgtgcgcccgcaggtggcccgtcaggtagtggacaagctcaaggatgggcagttcatgttttcgtggtaccccgaccagcgctggttgaagtcgtcgacctacctcaattgcaaaccccaacaggtggcgagtagtcgtacaatccgtggcggatagcctgtccccatagataagagagcgccgcatgcttctacataagtccacctggatcgagatcgggcagtttctggaacgcagccgcacggtggtgattcccatcggttccaacgaacagcatggccccaccggcctgctcggcaccgactggatgtgcccggaaatcatcgcccatgaggcgcagcagaacgcggatatcctgatcgccccgaccttcaatatcggcatggcccagcatcacttgggttttcccggcaccatttccctgcgcccttccacctttatcgccgcgattggcgactgggtgcgttcgctggccgggcatggtttcgagaagattctgtttctgaacggccatggcggcaatatcgccacgattgaagcggcgttttccgagctgtacgccgaagcgagcttcgcccgtcgccccgccggctttgcgttgaagctggtgaactggtgggacctggagggcgtaaccgacctggcccagcgccaattcccggtgggccatggcagccatgccacaccgtcggaaattgcggtgacccaatgggcctacccggacgcgatcaagaccgccgactactcaccgcaaatcgccaacaccgggccgatccgcgaggcgctggacttccgcgcgcgcttcccggatgggcgcatgggctcggacccggcgctggcgacggtagaaaaaggtggggagttggtggcgttggcggcgcaggggttggtcaagacagtgaacagcttcagctacgaagccaaaccctgagccatacatagatctacatgtggaagggggcttgcccccgataacagtgtgtcagctacagatgctctggctgacccaccgctatcgggggcaagccccctcccacatgtggctttatgtatggcctgggattactggcagtcctttgccgccagctctagccgcgacggcgtaatcgtcgacgccaacggcttgcgctcatacaagaacaccttggcgccctctccagccttgtaggcttccagcacgtcatcggcggcaatcttgctggtcagcaccactttggcgtgacgcgagttctgggtgacggtcgaagtgatcccgtgtttttccagcttgggcagcacgcactgcacataggcttccgggctcttgctggtttgcagggtcaggctcggggcattaggggcggtgacacaacccgccaacaccagggaagcaatggccaaggccggggcgaaaaaagcgcgcatgaaaaattcctgactataaaaataaaggttcacatcaaccggcacggaccaacgctttgagcgacgcatcgaactgcttcaaggcatcgagttgcacatcacgctgctgctcgatctgcgcggcaatctccggcgcggccttgtcatgtacccacaccgatggcacccgcttgtgcaccgagccttcggccctggcgatgtactgcaggttcgcgtcatagaaccgcgcaataaaacgcgcctcgaccacatcgttacgctgggtcagcagttggttgtgggtatcgagcatcaccaccacatcggggtgtgcctgcaccagggcatccaggttgtcgtagaccgttactgacaaaaaggtgccctgcagcgagctcatcaaccaatcgatggccagttccgggtcggaactgttgacgaacgcctggcggatacgcccgtcgagggcatccttggcgccattcaaggccatgtcgtggtagcgttcgaggtagctgaggttgtcgcgggtgttgtcgctcaacaacacacccaccgactgcgcgtgctgcagggagtctacgctaccgttgataggtagcaaatggctggtatgcagatcatcggcgattgccgcgttgttgacgaccaccgtgccaagcatcagagccatcaaagccaactgaataaacgtcctcatcgcgcatttccttgaacagcgtctcgatggggcgattttccgcttttccggaaaaaacagaacttgcgatgcgtgatggtgactattatctgaaccgatagtgctgacataaaacctataaggaccacgccatgaagccccaccagaaaaccttcgaccgcatccgcgaagccgtactaccggagtttcgcgagcgggtcgccgattacctggtcgactatgaacacgtgctgcaggacgaggcggcggacgcggatcggatcagcgccagcgcccagcaactgcgcggttacctgcgcggcctgaacaccacgcgggtgctgggtatggccgactgggaggagctggaccgccgtgtgaaagaggattggctacgggtggtcgaagccgaataactgccggggtgtatcgatcagcaaggcctgcgcgaccgctgccgaccagcccagggcctggcgctgctcgatcactacgcggtagccgatggtggtttcatgctgggtgtgcggccagtcactgccccacaccaagcggtgcagaccgaaactctgctgcaacaacggcatggcctggcgcgcaaactcaaggttctgcgccgggctgccggccaggcgatagatccccgagaccttcagccacaactggccgctgaggcccaagcccagtaactcggcaaaaccgcgctgcgcgacgccgagtcgtgcatctggccggccgaaatggtcgaccaccagcttgaccccgaacggcagcaactggcgcaccaattgcggcaggtcgtccacctcgcggtgcaactctacgtgccagcccagcacgacgatgtgctcgaaaaaaaccttccagccgggctcggcaaagtctggcagcgcccggcccaccaggttcaagcgcacgcccaccacgccggcgcgggccatcgcctgtaaagcgtgctgcgggatatcacggtccaccaccacgacgccgcgcaactgatcgggtgcctgctgcaaagcggccaacaggtagccgttgtcggtgcccaggaaactgggttgcaccaacacgccgtggctcaggccattggcgtgcaagtggccgatgtagtccgccagcgtggcgtcgtagcctggagtgtagcgacgctcaccggccagggtcagcgcctggctgaatacatgggcgtgggcgtcgatgccggtgatggaacggttatcaagcatggggtcgtctttcaaaagtaaaaaggatcaggcctgggcgcgctggccgctcacgacgcgctcggtgggtgtcgcttccagcacgcggccacgggtttccggcaggcacagcgcggcgatcacggcgacgccgtaggcgatcccggcatcgatgccgatggccgagccgagggacatcgagtcgctcatatgccccaccaggaagggaaacaccgccgacagcacgcgcccgaagttgtagcagaagcccacgccggcaccgcgcacatccgccgggtacaactcgttgaacaacgcccccaggctggccgggataccggcggcgaagaaccccagcgggaagccaaggaacagcatctgcgtattgctcagcggcaggaacacataggcctgcacggtgatcacgcagcacagcgcaaacagcacgatgttcttgcggcgaccaatgcggtcgatcagccagccactggcgatgcagccacaccagaaggcaaagatgatcaccgccaggtagccgcccgagttgagtaccgacaggttgcgctcggtcttgaggaaggtcggcagccaggtcatcaccgcatggtaaccaccgtgggcacccaggcccagcaggccgccgaacagcgtcacgcggatcagctcagggcggaagatgccggccagggacttgaagaaactctggggaatcgcctgctccttttgcaggcgctggaagctgtcaggctcctccacgttgcggcgcacccagataatcaggaacgacggcagcagccccaccacgaacattacccgccaggccatgtcctggggcacaaacgaatagatcagcgcaaacaccccgaccgccacgccccagccaacggcccaggcgctctgcacggtgcccatcaccttgccgcggtacttcgggttgatggtctcggccatcaacaccgcgcccgccgcccattcaccgccgatgccgaagccttgcagtgccttgacgatcagcaactgatgaaagccggtgacgaacgccgacaaaaacgtgaagaacgaaaaccacaggatcatccactgcaacgtgcgtacccgaccgtagcggtcggacaaggtgccgccgacccaaccgccgatggccgaggtcaccagcgtgacgccgctgatcagccccgcatcgcccttgctcaaggcgaaggccgcgatgagtgccgggatcgccaggccgaacatctgcacttccaatgcatcgagggaccagccgccgaagcaggcccagaacgttttgcgctcccgaggagtgacttggcgataccaactgaacatgatttttatccttataggtcaaacgcgaggcagccgggcgcgaaccgcgccacagccgggccagtgttgggcaaacaattaacggtgcgggtgtgcggtcagcgaatgtccacgcggtagcggaagtgttcggcatgcccacgggagcgtcgccactccaggggttggccggcgtagtcgcgggccagacgctcgatcaccaccaccgggctgttgaccggtacttgcagcaaccgcgcgtacaccgcgttgaccgattcggccgtgagggtttcctcggccgaggccaccacctgcccgcagacactctcatacaccggatagagcagcgggccttgcgcggacaggtctatgtcgagcaaggcctggaagcgcgcacgcggcagccagatttcttcggcgagcagcggctgcacgtcaaacagacgggtccgaacgatgcggatcacttgggcctcgggggccaggcccagcgcctcgctggccgccgacggcgcggccacggactcgaccgtgaggatgcggctttgcggcacctgacgctcgcccgacgggccttgaaaacggaaaaacctaaacagcgacgactggaattgcgggcggcgcacaaaggtgccacggccctgctgacgctccagaatgccctcgctcaccagcgcatccacggccttgcgcacggtgccggtggacagcgcatactcggcggacagcaccgcttcagtgggaatcgcttcgccagggcgccagcgattgttggcgatctgctcgatcagctggtcgcgcaagcgttggtaaagcggcaggcgggcatcactggacagcgtattcatggggtcacattcactttgttatgtagtcatatatatgaatatgaccggagtattcttccgtcgggtgacgcctgtcaagcgcatcaccgcaaaaggaagatgaatggtcgttactgcgtcgggcgttgttgctgcacccacgcttgcacggaaggccgctgccactggcgtcgggcgtactccaccaactcggcaggcacgctgtcaccgttgaggatcaggcgattgagcatcacggccaggtccacgtccgcgatgcaccactcaccgaacaagtacggcgggttacccgccaacagcgcctgggtcgcactgatcaacttcgccgccgccgcttcagccactggcgacagtgcgggcatcttctgcccatagaacaccaccatcgtcgagcgctcctgacggatcggtagcaagtcactgcgcagccacgcctgcacctggcgcgccctcgcccgctgttttggatcggccgggtacaccggcacttcagggtaggcctgctccaggtactcggtgatcgccgaggactccgacaaggcgaagtcgccttccaccagggtcggcacgcgctgggtcagggacagttgggcaaagtcggcggcgtgctgttgcgcggcatccaggtccagggcgatcgtgtcgaacgctaggcctttttcgcgcagggtcacgaacaccgacatggcgtaggggctggtgtacagatgatccacatacaggcgcataacgattctccttgaggggaacaccacgctacgagatgcgccacaagaaagacaatgcgctgtttttatgggggcattcctgggtggaataccgggctaaccggcaaatccgccctcgtccagaaaggcacgttcttcatccgtggtctcacgcgccaacacctcgtttcgatgaggaaaacgcccgaattgctcgatgatgcgcgcgtgttccttggcccaatggtaggtgttggcgtccagttgccggttcaggtccaaggagcgctgttgatcggccgggtcttccgaatgttcgaatggcagatagcagaacgcacgcaatgccggttcgacctgccggtccagcccggcgtccaccatgcgccgggcatacagccgtgcgagcgggtcggtggcgaacatatgggcggtgccgcggaaggcattgcgcgggtactggtcgagcaggatcagcagcgccagggcgccatgcgccgagtccagccagctttccagctcacgccgggccgcttgcaggtgggcggtgtggaaggtgtcgcggaagctggcgtcgaaggcagcgtccttggcaaaccagcgtttggggccggcgtgttgccagaagtcgatgacagcctgcgcagtggtcatggtgagtacctggaaagataatttagctgacggcatcagaatccaatgttataggataacacccccttgccgccctgccctgtgatcacgcccatgaccgatgctgttcccctgcgccaacgcctgctctccatcgacgccctacgcggcctggtgatcctgttcatgctgctcgaccacgtgcgcgaaaccttcctgctgcaccgccaggtcagcgacccgatgaccatcgacagcaccgagcccgcactgtttttcagccgcaccctcgcccatctgtgtgcgccggtgttcgtgttgctcaccggattgtcggcctggctctacggccagaagtaccagggccgccgcgatgtctcggcgttcctgttcaagcgcgggctgttcctggtggtgctggaattcaccctggtcaacttcgcctggaccttccagttgccgcccagcgtgatctacctgcaggtgatctgggcgattggcgtgagcatgctcgccctggcggcgctggtgtggttgccgcgagcgctgctgatcgtgttggcgctgctgatcattggcgggcataacctgctggacggggtgcacttcgatacggggtcggccttgcatattccgtggacgatcctgcatgagcgcagctggatcgaggtgggcgattcgctgcggttgcgcacgacctacccggtgctgccgtggatcggcgtgattgcattggggtacagcctgggcccatggtttgccaatggcatgccgccggcgttgcgccagcgttatctgttgctgggtggtgtgggtgcgttggtggggttcgtgctgttgcgcaccgccaatggctacggcgagaagccttggcaggcctatgagagcggcgtgcagacgctgatgagctttttcaacatcaccaaatacccgccttcgctgctgtttctggcgctgaccctgggccttggcttgctgctgttactggcgtttgaacgcgcggggcaaaaacgctggatcgccatcctggccaccttcggcgcggcgccgatgttcttttatttgctgcacctgtacgtgctgaaaatcctctacgtcgcctgtgtggcgttgttcggcctcaaccacggcaactacttcggtttcgacagcatcggcgccgtatggctggtggcgctgttgttgccactggcgctttacccgcctgtgcgctggttcgccgggctcaaggcgcgtcgccgcgacctggcctggctcaaatacctctgatccctgacgctcctacagcgggtggtgtcaggccgatgcagccatcgtcggcagacggtaatagggagacaaactcattttacttctgatggtcgcaaggtccgctcatgctgcgaccagatgcacatagaacgcgtgaaacatgaaatatgcacacaccgcgagagccaaacccatgcaccggttgaacagggtgaacgccgacgccccattgatcctccgccccagcagcgcccccaacaacgcgtagatccacggcgcgcaaaacgccccgaaggccagcgccgccgagaccacggcgatggacgcgtagaggaagatgtccatggaagacctgtagtagaggaagtgaggcgagtctactgagcggggttggggggattcttgtacgtttgtggtagggcaggatttggcgatgctgggcatcccagcgggagcaagctccctcgccacgggtatagtgtttgtcgaactctttgggataaaaccagacatggatgcaatcaatcaaggcagttgcctctgcggtgcagtcacttatcaagtcgcgacaccgctcaaggccgccacccactgccactgcaaaaaatgccagaaagtgcatggggcagcctttgccacttacgccagcgcgcctcgatcagacgtgactatccaagctgtgcgggacacgttgaaaagttatgagtcatcaccgggcattactcgccagttctgttcggaatgcggttcatcgttgttctggcacgatgcaaaagggctttatcccgattggatttcgattgcactgggcacactcgataccccgttcgcgcctcaggacctgaagcaaagctgcatcgagtccagggtcgcctggctgtaggagcgagcttgctcgctcctacagttgctacccgcgtttacggacctacatcaacggaatcgagtagttcacaaacacccgattctgatcctggtcccgcgccacttcactgcgcgacacaccgttgcgccagccgaacccgacgttcttgaacgtgccgctctgcaccacgtaatccagcgagatatcgcgctcccactcgctcgcatcgttgccgctggcagtgaggatatgctcgcccttcaagtacatcaccgacgccttcaggcccggcacgccaagcgaggcgaagtcataggcgtattgggcaaaggctgtgcgttcaccggcctggatgaaggtctgcacggtacggtcggtgtagaggtacaggctggaaccgccctcccctttgttgaccaggccgccctggttgagttgggcgaagttgctgtcgtccgagacttgctggtaaccggcggtgatcgcgtgcgggcccagggagtagatgaacgccgcgctccaggtgttgttgtcgatttcacccgtgccgttcttggtatagccgccgagcttgtaaccttcggcacggccggcgacgctgctgttcttgccgtcggaggtggtcttgaagtagcgcaggtcggttttcaatgagccgtagtcgcccagcggcaatacatggatcagaccggcaaagtgctgctggtaatagtcttcgaggttggcgtagtagtactggaccaacaggtccttggttacctggtagtcggcaccggcgtagttgaatttattgctttcctgggtgccgcccgccgccgccaggccgctgcgatcactggagccacgaccagtggtgtgctgcagttggccaccgaccagggtcaggttgtcgatgtccttgctggtgatctgcccgccttcgaacgactgcggcaacaagcgcccgtcgttgctcaccaggatcggcaggttcgggcgcaggtagccgtagcgcagttcgctcttggcaaaacgcgccttggccgtcgcaccgccacgggcccaggtgtcggcggccttgccgtcgtcggtggggatcatcgaactgcccacatggcggccggcgccgctgtcgagggtgacgccgagcatgcccacggcatccaggccgaagccgaccgtgccgtcggtaaaccccgactggtagttgaggataaacgcctggccccactcttcggtcttcgacggtgcggcggcgccgtcacggttgtcgttgttgaagtagaagttgcgcaggctcaagttggctttactgtcactcaaaaaatcagccgaggccagggggctcagggcaatgcccaggccgccggtcaatacgcttaacacatgcaaagtggctttcatcacaacctcagtcaattaatccatgggcgtcataaaacggatacggccccgggtattccccgaacacgccgttgtggctgatcaaaccctgctgcgcctcccagcgatgcaacagatagcccgccggctccaggttgaaatgcgcgggcgccgcttcttgtaaatccagcacgatctgatgggaggtgccggggcatacacaactcaggctgccgccgaaacgccgctgcatcggccggtgcagatgaccgcagagcaggcgctccacttgcggatggcgcgcaacgacgtgctccagggcggcagcattgatgaagggttcgcggtccatgtggccgatgccgctgatgaacggcgggtgatgcaggatcagcagcgtcggcgcatccgggcgcagggccaattgctcatccagccagtgcaattggctatcgagcaattggccgccgtgagcgccgggaatggtcgagtcgaggccgatcaggcgcagcggatggtggtcgaccacccagtccaacgggccatcggccgacaacggcagatacgcgtgatcgcggaacgcttccagcaacggcccacggttgtcgtggttgccgggcaccaggtagcacggcatgtgcagccgggcgagttcggggtgcaacacggcgtattcatcggcacggccaaagtccaccaggtcaccgctgatgaccacgatgtcgggccgtgggtgactggcgttcaagtggtcgacggcacggcgcagcgcgcctaacgtgtcgacaaccccgtaagtgaggcgctggccggctttaaggtgcaggtcgctgatctgcgcgacgagaaacggacgattcacgatagagtctcaagcattcagggtgaacaacatgtgcggcgcaattgccagggcaatcggcgcgccgacggcgtacagctggttatcgctgctgtcgaccagcagcggttgcgggccgcccacatccaccagcaggcggctttgcgcgccttggaagaactgcgccagcaggtggccgtgcaagtgcccttcgctctccatcaccttcaggtgttcggggcggcaatacaccgtgctgggcacgtgggcgtcatgccacggcaactcgccgccacagactttcaagccatgggccgctggctcgagcacggcaaaggcattgaggttgccgacaaagcccgcaacgaaggcattggccggtttctggtagatgtcacgcgggctggccaactgcgcgacacgcccgtgttccatcaccaggatgcggtcgcccagggccatggcttcgccctggtcgtgggtgacgaacaccgaggtgatgcccaggcctcgcagcagctcgttcagctcgctgcgcaggcgttcgcgcagttgcgcatcgagggcggccagcggttcgtccagcagcaacactttcgggcgcggcgccaaggcacgggcaagggccacgcgctgtcgctggccgccggaaagttcgtggatgctgcgctggccgtggtgctgcaagcccaccagttccagcaattcttcgcagcgcttgttgcgctccaccaccgccataccgcgaatcttcaagccataaacgatgttcccggccacatccaggttgggaaacagtgcgtagttctggaacaccatgcctacgtcgcggcgttcgataggaagacgggtcacgtcctggtcgccgaaccacacctggcctacatccgggcgttcgaggccggcgatcaggcgcaaggtggtggtcttgccgcaaccggacgggccaagaatggccagggtttcgccgccttcgacggtcaggtccaggtcatgcacggccacggtgccgtcggcgaatgccttgcgacagccttgcaagcggatagtgatagcggtcatcgacgctctccacgggacaaacgggcactgatggcctgcagcgctatcagcagcggcacgatcatcagcaaaaagataagggtgtaggcgctggcgatttccaggcgcgccgaggcgtagctgtcagccaggcccacgggcaaggtcttggtcatcggcgtgtgaagcatccaggtcaggttgaattcacccagggacaaggtcaccaccatcaacacgcctgccaggatcccggcccggcagttgggcaccaccacgctgaaaaagcgcttgatcgggccggcacccaggctggccgccgcttcctccagtaccggcaactgctggcgctgcatcaccgccatcaccgggcgtaccaggaacggcaaggtgaacagcacatggccgaccagaatgaacagccaactgctgcgaaaggtgccgaactggccgtaggtcagcagcaaggccaacgcactggccaaccccggcatggccaccggcagcaccatcaactcttcgaaggcgcggctgaagcggttgttcatgcgcaccaagccgtaggccgccggcacacctatcacgcagacgcacactgcgcaggccagcgccagttgcagcgacagccacacggtgggcgaatacgcctgccacacctgcaccagccaatcgaaggtcaagccactggacagcccgacgaagaaattgcgggtcaacccggccagcagcgacatcagcactggcaccagcatgaaggcgcacaccaacagggtgaacagcagttgcagcacaaacagcgatgagcgcttcacagcacactccccgaatttttcaccaggcggcgcgtgagcagcagcacggcccaggtcaccgcgcctagcaccaccgacaatgcggccgccacggcgaagttggcgtagttggtgaacacgttgtagatcgccaccggggtgacgttcagccgcgtgcccaaggtaaaggcggtgccgaacgcgcccatggaggtggcgaaacagatcgccccgcaggaggccagcgccggcgccaggcccggcacgatcacatcgcacaccacccgccaatgcccggcacccagggagtgcgcggcctcttccaggctgcggtcgaggctctcgcatgcggccatcaccgtgaggatcacccgcgggatcgagaagtacaggtaacccacgaacagccccgccagcgagtaggcaaagatccagcgttcaccggccaattgcaggcccagcgcggcaaacaagccctggcgcccggccaacaagatcaccaagaagccaacgaccacgccgggaaacgccagcggaaacgtgagcaacgccaccagcgccgagcgcccgaaaaactgctgccgggcgagaaacacgccgctgataccgccgatcaacagcgccaccagcgtcaccaccacggccaggaccaacgtttgccccaggctgcccaagtactgcgcgctgctgagcacctgccagtagccgctgccatggctgtcgcggctatcggcgccgagcgccatcaggtgcgccagcggcagcagccagaacgcgagcagcaccgcaaaggccggggccagcgcccaggctgcgtgtcttgccgatgctgccacttacttgacctcgttcaggtatcgggcggcgaaggcttcctgcacagcggccattttttcgtagtccaccacgccggcacgggcgtagtcgctgtcgggcaggaactgtgcggccacctcagctggcatcttcatcggccgtaccgggcgcagataggccttggcccagagcgcctggccttcgtccgacagcacgaagtcgaggaccttttctgcgttggcgcggtgcggcgcgttggccaccaggctcatcacgtagggcacgctgatgctgccttcctgggggatcacgaaagcgacgttggccttgtctttgtagcgggcgcgataggcgttgaagtcgtagtccaccaggattggcaactcgcccgacagcacccgcgcataagcggtctgtttgggcacgatgggcgcgtttttcgccagcttctggaagtagtcgatggccggcgcgaagttgtccaggtcgccgcccatggcgcggttgatcgccaccgccgagacgtacccgacaaacgcgctggacgggtcgaggtaaccgaccatgcctttgtattcaggcttgagcaggtcggcccagctttgcggcaccggcagaccgccgagtgcatcgacgttgaccatgatgcccaaggtgccggagtgaatcgcgaaccaatggccggccgggtctttcagcccggcgggaatctgctcccaggccttgggtttgtaggtgtcgaccacctcggccttttgcgcctgcaggccgaaggtcacgccgtagtaaacgacgtcggccaccggtgcggctttctctgccaccaactgtgccagggattggccggagttcttgttgtccagcggcacttgcacacctgtgctggcggcgatggccttgagctgggtgccccagtcggcccagtccggcgggcagttgtagcagatcgcggtttcggcggcctgggccaggctggccgaaccgcacagcagcacggctgccagggttttacggagtgcgcgcatcaggggtttcctcgtggggttgagtgctttcgcccggccggatatggcaaggcaggcagtgagacgtcggggcattgccggcgatctgcgccagcagttggtcaatcacagtgctggcgagcagcgcgatgggctgcaccacgctgcacagggtcgggtgcatctgggtgccaaggctgatgccatcgaagcccatcaccgagagttgcccgggcacgttccaggcgttgcgacgcagttcggcgatcaggctgatcgccaggaagtcgttggaacacaccagtgcggagggtgcctcagggccttgcagacaaggttcgatggcggcgaattcggcctgggtatgggctggcatttcgatcactgtgcggggctcgaggccgtattcgcgcatcgcatcgcaatagccggcgtagcgcaggcgcgcacggtccgactgcagcgcggggccggcgaccatactgatgcggcggtgcccggcttccagcaggtagcgcgtggccagggccatgccggcgcggttgtccaccgacacggcgctgtagttggggttgctgggttggtggtaggccaacacaaacggggttttctcagtattcaggctgctgagcaccacgttgctttcagcatcggtgaccgtcagcaccaggccgtccacgcgctggcgcaacagctcttccaccacaatgctttcgcgctcgctgctgtagtcggtagtcgccagcaacaggctataaccacgtaaccgtgccgcgcgctccatggcctggaactgttcggcgaacaccgggttgagcaggttgggcaccaccacgccgatcaactgggtggtttgcaggcgcaattggcggcccagcagattgggccggaagcccaactcgcgggcggcggcgaacacctgctcacgggtggtcgggcgcacctggtcgggggaggcaaaagtgcgggcggcggtggcgcgggataccccggccaaccgtgctacgtctttcaagtcagtcattgtcactcgcttgagatcgatctcattggcgaggacagtaatggggaaatgtggcagttcggcggtaaggtgatgacagtttgatgtcgatgaacccgatagacaggggccaaactgtgggagggggattgcccccgatggcagtgggtcagtactggattgggtggctgacacactgctatcgggggcaagccccctcccacattggaccggtgcccatccatagatggtcatactcggagggtagggtcacaaaccgggcgcgcaaaatccgcccactaacctttcgattcgatccaagtgcgggcacaatgcgtgtccttttttggcaggcaccgccgcaggctctcaaaaatgatcaaaacgccgtactacctcatcgataaacagaaacttctggtcaacatgcagaagattgcttacgtgcgcgaacagtccggcgccaaggccctgctggcgctcaagtgctttgccacctggtcggtgttcgacctgatgcagcaatacatggacggcaccacctcgtcgtcgctgtacgagttgaagctcggccgccagaagttcgaaggtgaggcgcacgcctacagcgtggcctgggccgacgatgaaatcgaagagatgctggataactgcgacaagatcatcttcaactccatcagccagctgcagcgttttgccgaacgttccgagggcaagacccgcggcctgcgcgtcaacccacaggtgagcagctccgactacctgctggccgatccggcgcgtccgttcagtcgcctgggcgaatgggacccggtgaagatcgaaggcgtgatcgagcagatctccggcttcatgttccacaacaactgcgaaaacggcgacttcagcctgttcgacaagatgctcggcgtcatcgaagaacgcttcggcgcgctgctgcacaaggttgagtgggtcagcctcggcggcggcatccacttcaccggtgaagactatgccgtggacgcgttctgcgcgcgcctgaaggcgttctccgagaagtacggcgtgcaggtctacctggaacccggcgaagcggcgatcaccaacagcgcctcgttggaagtgaccgtgctcgacaccctctacaacggcaagcacctcgccgtggtcgacagctccatcgaagcccacctgctggacctgctgatctaccgcctcaacgccaagctggcgccgagcgacggtgaacacacctacatggtgtgcggcaaatcctgcctggccggggacatcttcggcgagtatcaatttgatcgtccgctggccatcggcgatcggctgtcgttcatcgacaccgcaggctacaccatggtcaagaaaaactggttcaacggcctgaaaatgccgtccatcgtagtgaaacaactcgacggtactgtcgaggtggttcgtgaatttggttacgacgactacctgtccagcctttcgtaagctggcggataaaggagagataaagcaattgaaaaagaacgttcttatcattggtgcaggaggtgtcgccaaggtggtggcccacaagtgcgcgcagcacaacgacgaactcggtcgtattgctatcgcgtcgcgcaacatctccaaatgccaggccatcatcgacagcgtcaaggccaagggtagtctcaaggtgcccgccgatatccaagccttcgcgctgaacgccctggacgtggaagcgaccaaggccctgatccgcgagacccaatcgcagatcgtcatcaacgtcggttccgcgttcctcaacatgtcggttttgcgggcctgcatcgacaccggcgttgcgtacctcgacaccgccatccacgaagagccgggcaaggtctgcgagaccccgccgtggtacggcaactacgaatggaaccacctggaagagtgcaaacagaagaacatcacggccatccttggcgtgggcttcgacccgggtgtcgtcaacgcgtatgccgcgctggcgcagcaacagcatttcgaccgcattgattcgatcgacattctcgacgtcaatgccggctcccatggcaaatatttcgccaccaacttcgacccggaaatcaacttccgcgagttcaccggacaggtgtggagctggcagaacagccagtggaccagcaacaccatgttcgaagtcaaacgcaccgatgacctgccggttgtcggttcgcagaacctctacctcaccggtcacgatgaagtgcactcgctgtcgaaaaacctcgacgtgcccaacgtgcgtttctggatgagcttcggcgaacactacatcaacgtgttcaccgtgctgaaaaacctcggcctgctctccgaaaaaccggtcaccaccgccgaaggcctggaagtcgtgccgctgaaactggtcaaggccgtactgcccgacccgtcttcgctggcaccgggctacaccggcaagacctgcatcggtgacctggtcaagggcaccaagaacggccagccccacgagatgttcatctacaacgtggcgtgccatgaagaagcctttgccgagaccgacagccagggcatctcctacaccgcaggcgtgccaccagtggccgcagcgctgctggtggcccgtggcgagtgggatgtgaagcacatggccaacgtcgaggaactgccggccgaaccgttcctgaaagcgctggatgtgatggggttgccgactcgaattaaagacgagaacggtgatcgggcttgggatgcgattgcctgataggcgatagcggcccgaacaaaaaaatgcgccctctggggcgcattttttgtttggggcaaacacagccctcacgaccaatgaggtcaactgtgggagggggcttgcccccgatggcggtgtgtcagtcaacacatatatcagcagacacactgctatcgggagcccccccctcccacagttgaatttccagagtctgttattccagattccgagcctaattgctcagtggccttgaacactgcaaaagcgccgttacaccgtgcatgacctactgcccccaaacacttaatttggagtgacgccctgtggtggtagtaaccaatgccgtgtagtggtccaccccaaaaagaccctcgcaccgtcggcggtctgaccttgctgagacaacacttcgcctgccgcagccttgcgcaaaccgatcatcactggcagaaacctttcgcggaaagcctgtggttgcttagcgaaacaagcctcgatcgacttcaaggcctctttgcattcatgctcctcaagcattgcgaggtaaaacaccatctggcgccaggcataagctgtgttcttgagcataatcaatcgagcatgatagagaccggtgtgcatctgctgccgtttgcagacccactcaaaactcgcctgggccatgccccctagccgagtactcagcaaacctttcaacccgagctcgtcgaaaatcagcgcaaggttttgcgtcgttaaaatctgctgttgctcaaggatcgtgccattggttgcagggtgccaagtgcccagctctgccccagcccgctttgcgcataaggcagcaaaagcctcacttgcacctcgcgcacgccgtcgccctcttgtgacgaagccggccagttcgtcggtatcgatagagtagtaacgtgcataaagggagcctgcgattacccgactcgctcgccgagcagtgtcagcgaacttggttgagaactgccccatgaagatatctgcagcgacctcctccacaaagggaaggtccagctccgcagtgtccaccagcgttccaaattcctggagaagcttgttaggaaggatggcgtaggggaacgcatgaagcgtcaatgccgaagactcaacgagagcctggctcgctgcacccgctgccccggtacctgactgtcgatcaccctcaatggctgcaatccaaggcaactcactgaagcccacctgacgttgaagattcaatagcaacaacgaacgcctaaggcggaaagcctgataggtggaggcatagaccttcctcaacgcttcgtcgtgcagccctgcgctactcagctgtgcggtcatcgcgggcagtactcgtgcgactgtgtcacccgaagtaatcagcccatgctcaatcaactccctgattgttccgctgcgacagcgttgaacacgtcgcagaattggcgcgggtatcgcgacaccttcgcccagtgcgcaatccaccgcctcttgaacatcaagcggcttggccaaatcggcaaaatcaaagatgccactgtgtgcggggtacttagagaggcgctttgcgacggcacgcgcgatcagatgatgctctggtcctgatacctggcgaagctggtcctcccggaacgcgaggtgagagccggaagccggcgcaccatgtttgcgcacaaagtcatcgactattcgccgtatgcgacccacctgacgccctgtaagcgactctgcatcgcgagagcattgctctagcaacagaaacaattccgctacacgatcaggagagcgtttgttgatcccgagttgttcataacgcatagccaattcggctgcctgttcgtgccactttgccgggaagatacggcatggccagcccacctggtacgtcaggaggaaatgcgcgacggctgaatcataaagaggtagacgggcttcgatcgcctgtttctgagcaacgatttgagcccgcggtggcaaggttgaaagtaactgcttgacctcacctgcattggcgatgtggacctgcgtagctgataccggtagctgtgcggacgttgccggaaagaaacgcaatcggtcgaaaaacggaacaatcacgtctagcagtgccctggcctcgtcgttgcgacgctggctcgacagccatgccacggtcagtaacgcggcttcttccggaacatcaacgcgatagtcacaacgggtcagacgctgttgcagatgttcaaggccttcgtccgtcagatgccaagcgttgagatccagtcgctcaaaccctctgcgaatgccggaaatagaagcgaccaattcacgctcatagtcagttaactcgccacccgccaacaggttgccggtcgcaaagccgcctgtaatgacttccagcgtcacccagacaggtatctcggcaagcggggttcgcgagccatactcggcggtgccttgcagcatgtgcgcaatcacttgttgccactgtgagatacgtctgtgggcattgaatcgggcgagagggccacgggtttgatcgtgtgcaatcaatgccttggaaagttggaagaccgcataacccgcgtccatgccagtcactccgtttgctctggagaggtatccagattgccttttaatgtgatgggtccggaggctggattcgaaccagcgcccacccggttaagagccgagtgttctaccgctgaactactccggaacaggggcgcattgtcgggcaaccgctaaggaatgtgaaggtcacagatggtcattaagcaatggctgacgacactgctctttttttgtcagaaccagcgggaattattcaagtagcggcgtgccagcagatgtattcggtactgttacaccgttgctgagataaacacagccctcacgaccgatgaggtcaactgtagttggcttgccggcgatgtcggtgtgtcatttgtgcatttgttactgacgtatcgctattgccggcaagccggctctacagttgatttgcagcggatgttggagtggagttattcgaggttacgggctgagttactcagcgctctcgaacactgcaacaacgccggcgccaactgcttctccgcatccgccctactccaccgactggtcggcgccaccacatgcaccgccgccaccggtcgaccattggcacccagcaccggcgcaccgatggtcatatcgcccaggaacagctcttggccgttcactgcatagccctgttcgcgtacctgttgcaacgacgccatgatttcgtcgacttcagtcagcgtctggctggtgtgggcaatacgctgactgttctcgatcaacaccagcgcttcctcctgcggcaacgcgctcagataggcgcgtcccgacgccgtgcaatacatcggcacccgcgagccgatcggcatgtgcacgggtacgaagcccgagctgacgaaccgtgcgatgtaggtcatgtcgtagccggctggctcggtgaggcacgaggtctcgccggtcagccgggtcaactccgacaggaacggattcgccacctcaatcaacgaatgcgcatccaggtaactgaagcccagctccagcacccggggtgtgagttggtaatgccgggtgcgggagtgtttccgaaggtaacccaggctttcgagggtaaacaccatgcgctgggccgagcttttggtcatgccggcggcctcggccacctctgcaaggctcatgctgcggcgctgtgcgctgaatgccttgagcaccgacaggcctttttccagggattggttgtgcagactgttgcgttcttcggacatggcggactcacggtcaggtcgatcaggcgtggcgatatttttaacccaaatcacagaaatagaccattaaatatcgcatatcgatacgaatggttcattttttctattttccatagcgctatacgatttttattgatcgaaatggcacagagcttgcgatttcatcggcagccgcttgcggtactgactttccgttttccttctggagtaacccgatgaacagtctttcgcccttgtttcgccgccttgccttcggtctctgtgccacgttctgcgtcagcgttgtgcacgccgagagtgcgtcctcgtacaaagtcggtgcaacagccagtggttcgccgtttacctttctcgacatcaagagcaacagcatccagggcgtgatggtcgacgtggccgaggcggtgggcaaggccggcggctttaccagccagattgagcagaccaacttcgccgcgctgatcccctccctcacttccggcaagttggattttatttccgccggcatgctcaagaccgaagaacgcaccaaggtcgttgacttcagcgctccggtgtatgcctacggtgaaggcctgatcatcaacgccgacgacaacaccgcctaccctgacctcatgcctctcaaggaccaagtggtcggcgtgcaggccggcactgtcttctatgaccagttgaacaagctcggcatcttcaaggagatccgcacctacgactccatcggcgagatggtccgcgacctgtccctgggccgtatcaaggccgccgtgggtgaccagccggtggtggcctaccagatccgccagaagctgttcaaaggcgtgaaactggcgccggactacaagcccactaatgtcggtgaagtgtgcctggtggtgcgcaagggtgacgcgcaaaccctggagcgcctgaacaccgcgatcgccagtatcaaggcggacggcaccctcgacaacatcctcaagaagtggggcctggatacccaggtgcgcccatgaacccggcggagttcctgcaaaacgcccaggacttcttgccgatcctgctgcaaggcgcgtgggtgacgattcagatcaccgtgctgtcattcctgctcagcagcgcgatcggcctggtgctggcgttgctcaagctgtcgccgatccgtgcactgtcgtgggcggcgagcaccatcatcaacgtgatccgtgggctgccgatcatcgtgcagttgttctacatctacttcgtgctaccggacatgggcgtgcacctcaccgcgttctatgcgggcgtgatcggcatgggcatcgcctactcggcgtaccaggccgagaacttccgcaccggcatcattgccgtcgaacagggccagcgcgaagccgccgaagcactgggcatgcgctcggcgctgatgatgcgccgggtgatcctgccgcaagcctttcgcatcgccttgccgccgtatggcaacacgctggtgatgatgctcaaggactcctccttggtgtccaccatcaccgtcgcggagatgacccgccagggccaactgattgcctcgtcgaccttccagaacatgaccgtctacaccctggtcgccctgctctacctgctgatgagcctgccgctggtgtatggcctgcgccgcatggaacagcacctgggccggaggaaaaaagcatgatcgagatacgccaactgcaaaaacactacggcagccaccgcgtgctgcacggcgtcgacctggacgtggccaagggcgaagtggtgtgcctgatcggcccctcgggctcgggaaaatccaccttgctgcgctgcatcaacgcgctggaagcctacgacggcggccacatcaacgtgttcggcgaaaccgtgcagcgcggcagcaagaccgtgcacgccctgcgcagccgcatgggcatggtgttccagcgcttcaacctgttcccccatcgcaccgtgctggaaaacgtgatggaaggcccggtgtacgtcaaaggcgaaccgcccaagcaggcccgtgaagaagccctggtattgctggaaaaggtcggcctgagcgccaaggccgacgcctacccggagcagctctccggcggccagcaacaacgcgtggccatcgcccgcgccctggcaatgaaacctgaagccatgttgttcgatgaacccacctcggccctcgaccctgaactggtcggtgatgtgctggcggtgatgcgcaccctggccgatgagggcatgaccatgatcgtggtcactcacgaaatgggctttgcccgcgaagtggccgaccgcgtgtgcttcctgcatggcggctacatcgtcgaaagcgggccggccgaacaggtgctgggcaacccgcagcatgcgcggacccaggacttcctgcggcgcgtgctgcaccccaccggtaacacgcggagcctgtcatgaagtctttgtggtcagccacggctccatctgtggtgccgacgcctgcattgggcgagtcagtgacggtggacgtggcgattgtcggcgcgggatataccggcttgtcgacggcgctgcatttggccgagcgcggcgtcagcgtgtgcgtactggaggccaacgagccgggctggggtgcgtccggacgcaacggcgggcaggtcaacccgacgctcaaatacgacccgcagcaactggtgcagatctacggaccggagcgcgccgagccattgatctcgaccgtatcgagttcagccgacctggtgttcagtctgatcgaaaggcatggcatcgattgcgcgccggtacgcaaaggctggatgcaagtgtcgtacagcgaaaaaggcgtcgccgggttgcacgcacgggcagatcaatgggccaggcgcggtgtaccggtgcagcggctggatgccgcagcggtggcttcgcgcatgggcagtgaggcgtttgccggtggctggctggacggtcgcgccggggcgattcagccgttggcgtatgcccgtggcttggtgggtgcggcgttggcggcgggtgtgcggatccatgggcagagcgcggtgaccgggttgcagcgccagggttgcggctggcaattgcagacggctggcggtgcgcaggtcacggccgatcaagtggtgttggccaccaacggctacagcggcaacctgtggccgggcatggcgcagagcatcctggcggcgaacagttttatcgtcgccaccaaacccttgagcgggcgcgcagcggacagcatcttgccggggcaggaaaccgtctccaccgcacaacggctgctgctgtactttcgcaaagacagccatggccgcttgctgatgggcggacgcgggctgttcaacgaccccacgtcacccacggatttcgcccacctggaacgctcgctggcgctgctgtttccgcaattggggccactggaattcgagtatcgctgggcgggccgtattgcgatcacgcgggacttcatgccccatgtgcaccagcccgcaccggggcttacattggcgctgggttgtaatggccgtggcatcgcgctgtgtaccagcctggggcagcaattggcggggcggttgtgcgacagcacggcggatttcgcctacccggtgacgccgttgcagcgcttgccgatgcatgggttgcagcggttttacattggcgcgggggtggcgtggtacagcttgctggatcggctcaatgtgagctgaacagagccctcactcacaccactccccatgtgagagtgggcttgcccgcgacagcggtgtgtcagccgctggatgtgctggctgatgtaccgccatcgcaggcaagccagctcccacactggatctccttttccgggagaacctattgcacacgtaaagcgattaatactctcaatcgccaacggcgatcgctcccatgaacggggcgcaccctcaaaacaccgaccacccaatccgctcactcaacaattccaacgccttcatccccgccagcgagttccccgccgcattcagctccggcgaccacacgcacaccgtaaactgccccggcaccaccgcgacaatcccgccccctaccccgctcttgcccggcaagcccacgcgataggcaaaattgcctgcctcgtcgtacagcccgctggtggccatgatcgagttgacctgcttggtctggcgcgccgtcaaaatctgttcgctgctgtgggcgctcacgccttcgttggccaggaagctgaacgccctggccaagtccaggcagctcatctgcaaggcgcagtagttgaaatagctgtgcagcaccgcgtccacgtcgttgtggaagttgccaaaggatttcatcaggtaggccatggccgcgttgcgggcaccgtgctgggcctcggattcggcgacgacgctgttgaccaggatctgcgggttgcccgacaggcgccggacgaaatcgcgcatcgacaagatcggcacggcgaagcgcgattggttgatgtcgcagatcaccagcgcaccggcgttgatgaacggattacgcgggcggccacgttcgaattccagctgcaccatggagttgaacggctgcccggaaggctcgtgccccaggcgctcccagatggtttcgccaccgtggtcgatggcctgcaccaggctgaacaccttggaaatgctctgcaccgagaacagcgtgtcggcgtcaccggcgcagtaggccgagccgtcgttgccgtacacggcgatgcccaattggttggcaggcacatcggccaatgccgggatgtaatcggcgactttgccgaggccgatcagggggcgcacttcgtcgaggatcgactccagcagcgcctgcatgtcttgtccagtcatctgtctttgaatcggtggtaagcggggcgcggaggatacctgaaacacgcaggtcaagcttcatcagggccgcttcgcaccccaacacgggacaagcccgctcgccacagagggagtggggactccctcgccacagctcgatgttgcgtgcgctcaaaagtgcgccacatccgacacccgctcatccagcacatcccgcgccagcgcccaggcccggtccctggactccaccaccagcagcggatagccccaggccttgccgaacatcgcggcaaacggcttgagtgccaggcgctgcgcggcactgggttccacctggatcatgcctttgacataggtgcgcagcgcctgcttgtttttcttcatccagatcgacgcttgcttgcgctcctcatgggagtgttcgtgattgttctcgtccacggatttttcgtgcagcagcaggaagggttgctggcgggccagcaggctttcgaacacggcgaaggcatcctccggcccgccttcattgggcgcatcaaagacgattttcaccaccgggaatgttgaactgtcgagtcgcatggccgagctccttgttgagaattgatctcactataagggccagaccactggacggcattgcacagaatagccagactgtttcgcaattcagccaacctgcgatcccttgtcatgaaacaccatcgcctggaaatgcacgatccgtcactgtccagagacgccgacgtattcccccgcgccgtagtggccgtaggggccaccgccacgtcggatacctgggaacatacccagcatgcccatcgcaaaggccaactgatgtacaccttgcgcggggtcatccattgcgagattgaggccggtatctggatcgtgccgccgcaatgcgcgctgtggattcccggcggcacgccccacgcggcacggggggctggcgctgcggaagtctattgcctgttgatcgaccccgatgccgcctgcgccctgccccggcaatgctgcacgctggcggtgtcggccctgttgcatgagctgatcagcaaggcggtgagtttcccgcaactgtatgacgagcacggcgcccagggccgtttgatcagtaccttgctggatgaattggccgtcgcgcctgttgaagccctgcacctgcccatgccacaagatccgcgcctgcgtcgcctggccgacagcctgctggctgaaccggcggacaagtccaccctcggtcaatgggcggtgcgcatcggcatgagcgaacgcagcatgacgcgcctgctgctggaggaactgggcctgagttttggccgttggcgtcggcagttgcatgtgatcctgtcgctgcaacgcctggccaggggtgagagtgtgcagcgcgtggccctggacctgggctatgagaacgccagtggttttatcaccatgttccgcaagaccgtgggccagccgccggcgcgttatctggcggaccgcgccggggccttgcactcgctggcgccggcgacgattgcgctgaactgaaggtattgcctacccggatctgcgggcctgctcgccacacagtcaactgtccagatcagccaagcccaaatgctcacgcaacgtcgccccttcatacgcggtgcggaacagccccttgcgctgcaaatgcggaatcacgctctcgacaaactccgagaacgagcccggcaaataccccggagagatcacaaacccgtcgcaaccgccctgctcgaacaactcggccagttgatcggcaatctgcgcgccggtacccaccaattgcggcacacgtacgctgctggcgaagatgcgtccgagttgctccaaggtggtttgcgggccttgcatcaacagcttttcagccgccgccgggtggatcagcggcgactgggcgatctcggccagcgtcgccgagagcgggaatggcgaaagatccacattcaactgcgaagccaacgtcaccagccccaattccggacgggccaatgcattgtgctggtcgcgcttggcacgggcctcagcctcgctgccgccaatgaacggcatcaccgccgtgagcactttgcaactgtcggcgtcacgcccctgctgcaccacctgggcacgcacgtcatcgcgaaacgcacgcatggccaccaagtgcgggtgaatggtgaaaatcgcctcggcccaacgcgcaccaaagcgccggccacgcccggaagaaccggcctggatcagcaccggtcggccctggggcgtgcgcgggatattcagcgggccttcaaccctgaaccattcgccctggtgctgcaccgaacggatcaatccagggtccgccagtacgccgctttcgcggtccagtttcagcgcgtcctggccccagctgttccacagtttcaacgcgacttcgacaaactcatcggcgcggtcatagcgcaggtcgtgctccaggtgcttgtccttgccgaacaggcgcccttcgctgtcgttcatcgaggtgacgatattccacgccgcacggcccttggacaggtggtcgagggtggcaaattcacgggcgatgtgcgccggttcgtaataggtggtggaccgcgttgcacccaggcccagcttgctggtcttgccgaccaggtaagagaggatcggcaacgggtccaggcgcgtggcgtcctgggcgccgtagcgcaaggcgaactcgcgggagccgcccatctggtcgcccacggccaggcggtcggcgaagaacaggaagtcgaacaacccctcctccaccaccttggccacccgtgcgtagtactcagggtcgaggtaattgccaacggtttccgggtggcgccataccgcatggctgtgcacgaccggcccactcagcaggaacgcggataaatggatctggcggctcatggcttgggcgtccacacgttgatgtcgttgatcttcaacgccctggggatcagcttggcggcgtagtaggtgtcggcgatgcgctgttgctcggcgaggtggtccagcttgaccgggatgatgtcgtagctgcggcggctattggcgcgctccaccgtggccggggggatattgccccacagcgggccaaggatggcggcggcttccttgggatgggcctttacccattggccggtctcgcgcagggtgtcgaaggtcacctgcaacacgtccgggtgggccttggcgaactttgtcgtcgccaggtagaaacggttgtagtcggccaggccgttcttgccgtcggcgatcacccgtacatggtgatccagctgttgggtggcgaggaacgggtcccagattacccacgcgtcgacactgccattggcgaacgccgcgccgccatccggggcttccaggtaacgcggggtgatatcggccagggtcaggccggcctttttcagggccgagatcagcaggtagttgctgcccgaacccttggacacggcaaccgtcttgcccttgagctcggcgatgctgtggatcggcgacgtgtcctggacgatgatcgcctgggcgcccggcgatgcgttttcctgggcgtaataggtcagcggtgcatcggcggcctgggtgaacagcgcgaaagcgtccgccacatcggcgtgcaggtcgacactgccggcgttcagcgaactgagcagaccggtgctgaattcatgccagttcaccgtgaaccccaggggcttgaggcgctgttccaactggccattttgcttgagcaggatccacagcgtggatgagcgctggtagctgatatccatggtttgctcggcctgggccgccgtggcggcgaacagcaggctggcggcgacgattaggtttttgaacgtcatgggaggccttggcgaggaagaaatgaagggcgctgcttatgccaaaaaaccacgtcaggcctggcaataaagcttgttcaattatattaacgatgagaaatgatgaaagaatcttataattctatggttatgcccaattcataggcggcagggaaaagcgtcctaagctcagatcgaaagagtatttaacgaatagtttttagaactttaagctcaggcctatttcgtcacagatcgagctcgccatgtccctacgtcaccccttcgccgcactcctcggcttgctggctctgtccgtcgccatcagcgcgcaggcccaggaaaccgtacgcatcggttaccagaagtcctcgaccctgatcaccctgctgaaaacccagggcaccctggaaaaagccctcaaggccgacaacatcgacgtgagctggcacgagttccccagcggcctgccgctgctcgaagcactgaacgtgggcaacgtggacatcagcgccgacgtggccgacaccgtgccgatcttcgcccaggcagcccaggccaaactcacctacttcgcccaggaagccccctcgccttcggcccaggccatcgtggtacgcaaggactcgccgatccagaacctggcggacctcaagggcaagaagatcgccgtgaccaaggccgccggcacccactatttgttgatcgccgcactggccaaggcggggctggccttttcggatatcgaaccggcctacctgtcacccgccgacggtcgcgcggcgttcgagaacaacaaggtggacgcctgggtcacctgggaacccttcctcaccagcgtgcagcgccaactgccaacacgcaccctggcggacggcgcagggctggccagctacaagcgctactacctgacgggtacgccgtacgccaaggcccacccgcaagtgttgaacgtggtgtacgcgcaactggaaaagaccggccaatgggtgaaaacccacccacaagacgcggccaaagtacttggcccgctgtggggcaacctggatgtcgcgacggttgaagcagccaatgcgcaccgcagctatcaagtgcagcctgtgacgattgatcagttgggcgaacaacagaaaatcgccgatgcgttcttcaaggcggggttattgcccaaggccgtggatgccaaggatgtacagacctggaagccttgaggcagccattgtaggagctggcttgccggcgaaagcgctgggtcagccgcttttccgttgctgatctaccgctatcgctggcaagccggctcctacagggggcgtcattcgcaggcaaaaaggtgcccccccgtatcccccggtgtcagggtagttgtcgtgtcctccgctttttaaaagtattccgggggcggcaagagtaaggtcatgcctttctattcagaagaacgcaaagctgcgctgttgaaaatga

SEQ ID NO: 87 - DNA, 405701 bp, Pseudomonas nodulensis
  misc_feature (178396)..(178437): n is a, c, g, or t
  misc_feature (298304)..(298677): n is a, c, g, or t
  misc_feature (388069)..(388103): n is a, c, g, or t
  misc_feature (399906)..(399981): n is a, c, g, or t
tgacacccgcccagcgccacgagggaaaagaccgggaaatcttggcccggagggcggcaatctatgggcaagcgagagaaaaaaggcctgaaaggtggtcaggcgagacacgcaactggaaccctatcgggacggtgtacctcaatcccgaaagggagctgacagttgtcgtgaaggtcgcctagcaagacgggagacacgacaactaccttgaaaaacgccggtatccacgatgcgaagcgagtcgctcttgatcctgcttttgatctaaggcgccccgtcaaacacgctggccggaattcgacagggatttggggggtaaaccggcagggatgccggtttagccgccccgcgccatggatggcgcgtggcggcggccccccaaatacctgtcggattacgggcacaccgagcctaggcgaggtgccgagtgttggggcaagagcgttttgcttacttttgactgggccggcattccggcttttcaaaagtgagccgccgtaagggcggaaccattagcagccgttacctaaataacggatatgtacctggtctgatccaacattctggtcggctgtcaggccgccttcgcgagcaagcccgctcccacatttggatcgcggggcaacagttggagagtggttggctgtcaggccgacttcgcaggcaagccagctcccacatttggatcgtggggtggcagttagagagcggttggctgtcaggccgacttcgcaggcaagccagctcccacatttggatcgtggggtggcagttagagagcggttggctgtcaggccgacttcgcaggcaagccagctcccacatttggatcgtggggtggcagttagagagcggtcggctgtcaggccgtcttcgcaggtaagccagctcccgcatttggatcgtggggtggcagttagagagcggtcggctgtcaggccgtcttcgcaggcaagccagctcccacatttggatcgcggggcaacagttggagagtggtcggcagtcacaacagcgtgcgctccagcgcctttttccacgcagcataacgccccgccatagcaggatcatcctgcggctcaaaccgctcccgctgccgctccagcgcgcccaacgcgtcatcactcccccacacacccaacgccctccccgccaagtgcgccgcgcccagcgccgacacttccggcgacaggctgcgcaccaccggacgttgcaacagatcggccaaaaactgcatcaaccaacggttacgcgtcgcaccgccgtccacccacaactccttcaacgggctaccgatgtcctgctgcatagcctcaaagacatcgcgaatctgataaccaatcgactccagcgacgcccgcaggatatgcgcgccggaggtggcctcggtcagcccgcagatcaaaccgcgcgcatcagcctgccagtgcggtgcacccagcccggacagcgccggcacaaaatacacaccaccattgtccggcagttgcgcagcctgctcggtgagagcatccagggattctcccgccaccaggcgcgaggcccactgcacggcggcgcccgtatggacgatgttgccttccatgccgaacgtcggttggccgccgtcgtgccaggccagcgtggtggacaaaccgtgagtcgaggcaatcgggccgctcatgggcgtcattaaggaagaaccggtacccagtgtcgccttcaccagccccggcgcgaacccgccctgcccgtacagcgcagcgtgggagtcgccgatcatcgacatcaccgggatgccggcgggcaaaccacccgccgcgacggtttcagcaaagaaaccggcgctcggctggatcggggccaatgccgccagtggaatcttgaacagtgccaatagctccgggtcccaggcgcaggtgtgcaggttgaacagttgcgtgcgcgccgcgttggagtagtcggtggcaaacacctggccgccgctgagtttccacagcaaccagctgtccaccgtgcccaggcagatatcaccggcagcggcacgtgcgtgcccctcttcaaggtggtcgagaatccagcgcaacttgccggcggagaacatcgggtccaaggccagcccggttttttccaggatcagcgcctcatgtccctgctcatgcaattgggcacacaacgcggtggagcgccggcattgccaactgatgcacggcgacagcgcctcgccggtctgccggtcccaggccaccaccgattcacgctggttgctgatggccagcgctgtgatcgggcggtccacctgggccaggcattcctcaatggcggccagggtgctgtgccagatcagcagcgggtcctgctcggagaaccccggctgcggatgggtgatgctcagcggccgcgagcctcgggcaattacctgcccgcgcgcattgaccagcaccgccttggcgttgctggtgccttcatctatcgccaggatcagcggagtgttgtctgtcatcgcattcaccgcaaccgagtggcagccgccacaatcccagccgcgtcgatgttatgcaaggcgcgggtgggttcgcgggcgccggccgcggcatattcgccatcgccgatgcccaggcgcaccagggcaatgcccagcccggcttcggccagcacttcggcgaccaggctgccgatgccaccgttgatgttgtgctcctcgaccgtgatgaccgcccgcgtgccacgcagggcgctgagcaacacgtcacgctgcaatggccggatcgacgacaggttgatcacctgcgcctggatgccctgctccgccagcacccgtgccgcgtccaccgcttcatgcaccaccgagcccagggcgacgatgctcacgtctgcaccctgacgcaggatatccacctgccccggggcaaattgatagtcgcccgtgtgcacgtccggcaacgccttgccatccagacggatgtacaccgggccgtggtagcgcagcgcgtagtcgacgatctgccggcattcaagcgcgtcggccggggcaaagatctgcacgttgccaaaaccgcgcatcaccgaaatgtcgtcgaggctgtggtgggtgctggccaacgggccgtaactggcgccggcgttcaggccgaacatcttcacgttggcctggttgtagcaaacgtcgactttgatctgctcattggcccgcgaaatcagaaatggcgccgcgttgcaggtggcggcgatcttgccgcccagtgccaggcccgccgcgacgctgaccagcgactgctcggcaatgcccacgttgatcagccgctcgggaaagcgctgtacaaacggaccgatcttagccgtggaggtggagtcactgaccaccggcaccacgtccagtccggcatcgacggcggcaataaaggcctccaccatgacgctcgccaggtgttcactcgccatgattcaactcctccagtgccgcgttgatttcatcacccttgggcacgcggtggtgccattcgggacgggcttcgataaacgacacgcccttgcctttgatggtgtgggcgatcagcacctggggcgcaccggtcctggcctgcatgttttccagggcctcgatcaactggcccgcatcgttgccatcgcactcgctgacgcgaaaaccgaaggccgcccatttcacgtccagcgggtccagcggcatgatgtccgccgtcaagcccgccagttgcagcttgttcttgtcgacgatcacgaacaggttatccaggccgtatttcgccgccgccatcgccgcttcccagttggagccttccgccagttcaccgtcgccggtcagcacataaatgcgttttttgctgccggacatcttcgccgccagcgccagccccaccgccaccggcaggccgtggccgagggcgccggtgttcagttcgatgccaggggttttctgccgcaccgggtggcccggcaagtgggagttgaagtgctggtaggtgggcagccagtcgacggggatgtagcccgcctgcgccaggcagcaatacaaaccgccgacaccgtggcccttgctctggatatagatatcgcgctcagggtcgtcggtgcgttccgggccggtattgagaatgcggaaatacagggtcgcgagaatatcggtttccgagaggtcggccccggtgtggccgccggccggtgagtcggcattcaggcggatcacatggcgccggatcaggcgggcctgttctttgatctggtgggcgtcgtactggaaggcattcatgcagcggctcctttgaggctgaccacgcggggtgaaagtgtgcaaagctgtatttgaatatttattcagcagtgacaatatatttctatttagacgccgaacgctcgacaggtcaagtgaatgaccggggggaaaatgaaataaaacctggaaatgtccctcagacaaacggccaaaatcccacacgcgcttctctatcccgtggctttgcgccggatgaaagtcgcgatccagaggcctactggaaaaattaagcgcttgacattgccacggtggcactggaatctgaattaacagtcaagcacgcataaatattcacggcgcttgaaagcactccaaaaaaaataaatcaggagaacactgtggacgccaaagctactgtccagcatccggccgaactcaagccgccccaccgcccccggttggtgaaactgcttcccagcaatatcggcggcccgctgatcggcctgatgttgctggtgctggtcttctccttcagttccgaattcttcttctcgctgcgcaatggcctgaacattcttgaccaggtcacggtgctgggcatcctcgcaattggcatgaccgccgtgatcgtgatcggcggcatcgacctgtcagtggggtcggtgctggccttctcgatgatgatgctcggctggctgtaccaggaccaggcggtgccgctggggtttgcgatcccgatctcgattgccagcggcatgctcgccgggctggtgtccggcgccttgatcacctatgccaagctgccgccgttcattgccacgctgaccatgatgtcggtggcccgtggcctggcgaacatcctcaccgaaggccggcagatcgtcggttaccccgactggttcaccagcctggccacggtgcgtcacttcggtttcctctcggcaaccgtcgggctgttcctggtgatgctggtggtagcctgggtgttcctgcgctttcgtgccggtggccgtaacttgtacgccatgggcggcagcccggaagtggcgcgcctgtccgggatcaaggtgcgggcgatcaccctgtgggtgtatgccatcagcggtgcgctggccggtatcgccgccgtaaccctggccgcgcgcctggactcgtcccaacccagcgccggcctgagcctggaactggacgccatcgccgccgtggtgatcggcggcgccagcctcagcggcggcgtcggcagcatcggcggcaccctggtcggcgtgctgatcattggcgtgctgcgcaatggcctcaacctgctcggcgtttcgcccttcattcaacaagtggtgatcggcgtggtcatcgccctcgccgtgaccatcgacaccctgcgacgccgctccagtactgcccgttaaacctgttcgacagttgacaccctccaacaataaaaccaggagtcaccgacatgttcagccccaagaaactgctgttggccaccgccctcgcggccgccaccctcaccgctgccggcaccacgtgggccaaggacctgaccatcggcctggccgtggccaacctgcaggccgactttttcaaccagatcaagcaatcggtggaagccgagggcaaggccaagggcatcaaggtgattaccgtggatgcccagggcaactcctccacccaggtcagccagattgaagacctgatcactcgccagatcgatgtgctgatctacatcccggccggtgccaccgccgccggtgtgccggtcaaggcggcgaaagccgccggtatcccggtgatcgccgtcgaccgcaacgcccccgacgcgccaggcgatacctttatcgccagtgacagcgtggccggggccaagaccctggccgagtacgtcggcaagatcaccgatggcaaaggccgcatcgcgatcctgcaaggccagctcggcaccacccccgagaacgatcgcgccaagggcttcgaagaaggtttgaaagctttcccggacctcaaggtcgtcgcccagcaacccgccgaatgggctcaggacaaaggcttcgccgtggcccaggacctgctccagcgtgacccgaacatcacggtgttcttcggccgtgccgatgccatggcgttgggcgccgcccaggcggtgaaggtcggtaacctcgaccacaaggtggtggtggtcggttttgacggtgacgtcgccgggctcaaggccgtggaaagtggcgtgctgaacgcgaccatgacccaacagacccagaagatgggccgcctggccgtggcgtcggccatcgacctgaaagccggcaaggctgtgcccaaggagcaactgttgcctaccgtgctgaccaccaaagaaaacgtcgcgccgttcctgcaacagcacccgtaagccttggaggtcgtcatgcaagcagcagccctggacaccgctcgcgccgacgcggtgctgtgcctgcgcaatatcagcaaggcctatgggccggtgcaggtactgtcgcaggtcaatgtggacatccgccccggcgaagtgctggccctgctcggtgagaacggtgcgggcaagtcgaccttgtcgtcgatcatcgccgggctggtacagcctgaagccgggggcagcatgacctggctcggcgcaccttacgcaccggcgtcgcccggtgcggcactgagcgccgggatcggtctgatccaccaggaaatccgcctgctgccgcaattgtcgatcgccgagaatatcttcgtcggccgcctgcccatgcgtcatggacgggtggaccgcgcgtacatggaggcccaggcgcagatccagttggagcgcctggggctcaaggtgccggcatcgcgcaaggtcgaaggcctgagcgtggcggcccagcaattggtggaaatcgccaaggcgctgaccctcaaggccagcctgttgattctggatgaacccactgcggcattgggcggcgaagaaaccgagttgttgttcaaacaggtggaacggctcaaggccgagggcgtgtcgtttatctatatcagccaccgcctggaagaaatcgcacgcatcgccgaccgcgtgctggtgctgcgcgacggtcgccagattgccttgcacgccaccgcccaggtgccggtgcgcgagctggtggaacagatggtcgggcgtagcctggagcggattttcccggccctgcaagcaccacaggatcgcgtgatgttgcaggtcaaggacctcagctgtcgcgagtttgccttgcacggcatcgacttcagcgtgcgcgctggcgaagtgttcggtattgccggcgtggtcggcgctgggcggaccgagctggtgcgcacccttgccggcgcggcacaggatatccagggccacctggtgctcgacggtgaagtgcgccacctgcgctcgcccttcgaggcaatccaggccggtgtagtgctggtgcccgaggaccgcaagcagcaaggcgtggtggtggagcaccgcatcgaagacaacctgatctacggcaacaccgacctgttggacaagcgcggctgggtgttccctgccccgctgcgcgaattcgcccgcacggcggtggcgcggttgggggtgaagggtgcgccgcagtcgcgaatttcgagtttgtctggtggtaaccagcagaaggtgatcattgccaagtggctggcgcgcaatcccaaggtgttcatccttgacgagccgacacgcggcatcgacgtgggcgcacgggcggcgatctatgaagtgatcgcggacctggcggccaagggcatggcggtgattgtggtgagctcggacctcgatgaggtgctggggttgtcccatcgggtgatggtgatgagccggggccggcagatggggatcctggagcgtggcgcggccacccccgtttcggtgatggaaatggcgactgcttaaccagagaacaccgctgttttttgtgggagggggcttgcccccgatagcggtgtatcagtcacacacttttcaactgaaccactgccatcgggggcaagccccctcccacaggggtcagctgtgatttcaaataacggagttatccatgcagctttttagtcttgaaggccaagtggcctttgtcaccggcgcaggcagcggcattggccaggcgattgccgtggggctggccgaggcaggtgcggatgtggcctgcttcgatctaccgggcagccccggcatcgccagcaccgtcgaacgcatccaggccttaggccgtcgcgccctggccttgagcggtacggtcaccgagcgcgccgcactggatgcagcggtcgcgcgcaccgaagccgagctgggcgaactgagcgtcgcggtcaattgcgccggcatcgccaatgcccaggccgccgaagacctcgaactgcaacgctggcaaaccaccctggacatcaacctcaccggcattttcctcagttgccaggcccaggccgccgtgatgttgcctcggggaaaaggagccatcgtcaatattgcctcgatgtccggcagcatcgtcaaccgtggcttgctgcaagcgcactacaacacctccaaggccggcgtgattcacctgagcaagagcctggcgatggaatgggccgacaaaggcttgcgggtcaattgcatcagccccggctacaccgccacgccgatgaactcgcgcccggaagttgccgaccaggtgaagatctttgaacagaccacgccgatgggccgcatggccagcgtggaagaaatggtcggcccggcgattttcctggtcagccaggcctcgtctttctgcaccggtgtcgacctgttggtcgatggcggctttgtgtgctggtaggagttcgtcatgtcccaacgattcagcggtaaaactgtggtcatcaccggcgcctgccggggcatcggcgccggcattgccgagcgcttcgcccaggaaggcgccaacctggtactggcttccaacgacttggaacgcgtgaccttcaccgccgaccaactggcccgggaataccaggtcgacaccctggccctggccatcgacgtcacccgcgaagacgatatcgaaacgctctaccgcgaaggccacgcgcggtttggcagcatcgacgtgtcggtgcagaacgccggcatcatcaccatcgaccattacgacaaaatgccccgcgccgatttcgacaaggtgctgcaggtcaacaccaccggcgtctggctcggctgccgggaggcggccaagtacatggtcaagcaaggcagcggccggctgatcaacacctcctccggccagggccgccaggggttcatctacacgccccactacgccgccagcaaaatgggcgtgatcggcatcacccagagcctggcgctggagctggcgcggcataacatcacggtcaacgcgttttgccccggcatcatcgaaagcgagatgtgggactacaacgaccgcgtgtggggcgagatcctcagcaccgacgagaaacgctacggcaagggtgaattgatggccgaatgggtcaggaacatccccctgcgccgcgccggcaaaccctcggatgtcgcgggcctggtggcgtttctggcctcggacgatgcggcctacctgaccggccaggcgatcaatatcgacggcggcctgatcatgtcgtaagggtttggtatcctcacggccattgagtcatgccttttactataaagagccctgaggccttcatgagccagatcgaagaacagcgcctgatcaccaagatcgcgagcctctattacgaagaagggctcaagcagtccgagatttccgcgcaactggacctgtcccaatcctttatcagccgcgccctgcgtcgggcgctgcaggaaggcgtggtgaagatcacggtgatgcgcctgcaaggcctgcacctggagctggaaacccagttgcaacgccgctacggcgtgcgccgggtgatcgtggtggaagccaccgagccgggcaatgacgagagcatcaagcaggccatcggttcggccgccgcccactacctggaaaccagcctgtcgccccaggaccatatcggtatttcgtcgtggagcagcaccattcgcgccatggtgagccacctgcacgcgcaaccgggcaaacaggcagcccaggaagtggtgcaactgttgggcggcgtcggccacaagggcgcgtttgaagccacgttgctgacccagcgcctggcgaccctgctcaactgcccggcgtttctgctgccctcgcaaagcatcgagcaatcggtggagagcaagcagcgcatcgtgcagatggaagaggtcaaggaagtgctgcagcgctttgacagcatcaccctggcgattgtcggcatcggcgacctggagccctcgcaactgctgcgcaacagcggcaactactacaccgaagacatgctgcgcctgctcgccgaacgcggcgcggtgggcgatatctgcctgcgctacttcgatgcccagggccagccggtgctggaggaagatgaagaattcgtggtgtcggtggcgctgcccaagctgcgtgccatccaccgagtgctcggcctggccggtgggttgaacaaggtccaggccattcgtggcgcactccagggcggctacctggacatcctgatcaccgacctggacaccgcacaggccctcaaccaataaccctttttggagactgccgctcatgacgtccaagctcgaacaactcaagcaattcaccaccgtggtgtgcgacaccggcgacctggaagccatcagccgcctgcgcccggtggatgccaccactaacccgtccctgctgctcaaggcggccgccatcccggaatatgccgagttgctgcgcagcgcggtgggccagtccaagggcgatgtggacctggcctgtgaccgctttgcggtggcggtgggctgcggcattctcaaggtgattccggggcgcatctccaccgaagtcgacgcgcgcctgtccttcgacgcagacgcattatgggccaaggctaaccagttgatcgcgctgtacgaccaggccggcgtcggccgcgaccgcgtgctgatcaagctggcctctacctgggaaggcattcgcaccgccgagcgcctggaaaaggccgggatccagaccaacctgaccctgctgttttcgttcgtccaggccgccgcctgcgccgatgcaggggtgttcctgatttcgccgttcgtaggccgcatctatgactggtaccgcaagaacaccggcctggactacaccggcgccgaagacccaggcgtgcagtccgtgacgcggatctacaactactacaaggccaacgccatcaacaccgtggtcatgggcgccagcttccgcaccctcagccagatcgaacaactggccggctgcgatcgcctgaccatcagccccgagctgctgcaaaagctcgatgaagaccagggcctgctggaacgtcgattgaatccgggggcggttggcgagccgcgccagaccctcaacgaggcgcaattccgctggggctccaatgaggacgcgatggccaccgagaaactggccgaaggcattcgtcagttcgcccgcgaccaggaaaaactcgaggcggtcctcgcagccctatgagccctgccctgtcgctgagccagcctcgcaccctggtgttcctggcctacccccagatgggcctgctcgacctgaccggcgcccagaccgtgttctgggccgccaccaaggccatggccgagcgtggcttgccgggctacgtgatgcacaccgccagcctggccggcggcctgatgcagaccgccgaggggctgagcgtggacacgctggcgctggagcacctggacacgcacgtcatcgacaccctgatcgtgcccggcgcgccggcgatccaacaggcgatggccgccaataccgagctggtgcaatggctgcgcgtggcctccgccagcgccgggcgcaccgcctcggtgtgcagcggcaccttcctgctggccatggccggcttgctcgacggccgccgcgccgccacccactgggccatgtgcgacatgctcaagcagggtttcccggacattatcgtggacatggacgcgatctttatccaacagggcaatgtgtggacgtcggcgggtgtgaccgccggtatcgacctcgcgctggcgttggtagaggccgattgcggacggcccgtcgccctgcaagtggcgcgggaactggtggtgtttctcaagcgccccggaggccaggcgcaattcagccaactgctgcaagcgcaaaccgacgacaccgccggtttcgatgccttgcacctgtgggtcgccgacaacctcagcgacagcgacctcaccgtggagcgcctggctgaacaaagccgcatgagcccgcgcaactttgcccgggtctacaagcagaaaaccgggcgcacgccggccaaggccatcgagctgtttcgcctggaagcggcgcggcgcctgctggaagactcccagcgcaacatcgaccaggtcgcgcaactgtgcggcttcggcgacgaagaacgcatgcgctataccttccagcgtcacctttcgatctctccccgcaactatcgcgagcgcttttcacgctgagcgcctgcggcctggcagtaattcagggttatgtgtcctaccagacaagcagcgctgcttttacagtgagccggcaacgcctcaccgcttgagcaaacgaattgacctggtccctggaacatcccatgaaacagcacatccttattatcggcgccgggttcggtggcgtctggagcgcgttgagcgctgcgcgcctgctggacaaacatgatcgccacgacgtgcagatcagcctcctcgccccacagccggaactgcgcatccgcccacgtttctacgagcccgctgtacacaccatgcaggcgccactgggtccgttgttcgaagccgtgaacgtcaagttcattcaaggcgcggctgacagcatcgatgaaaacgccaaacacgtgacctaccgggatacggccggcatctccaccacgatcccgtacgaccgcctggtgctcgccgccggcagccgtctgaaccgtccgcagatgccaggcatcgagcatgtcttcgatgtggaccagatcgaggatgccacgcgcctggaagctcatatcaccgcgttgaaaaacctgcctgatagtcccgcgcgcaacacggtgctggtcgctggcggtggtttcaccggcatcgagacctccaccgaaatgccggcgcgtctgagggcagccttgggtgacgatgccgatatccgcgtcatcgtcgtcgaccgtggcccgcagattgccgcctccatgggcgatggcatccgcccatcgatcatcgaagccagcaacgcactgggcctggaatggatattgaacacgtcggtggcttcagtggatgccagcggcgtgaccctggcggatggacaacgcattgaatcgaaaaccgtgatctggaccatcggcttccgggccaacccgctcaccgagcaggtcagcggtgcccgcgatccccagggccgcctgcatgtagacggcaccctcaaggtcaagggccaggccgacgtgttcgccgccggtgacgtggcttacgccgccaccgacgacctgggcaactttgccggcatgtcctgccagcacgccatcgccctgggccgctatgccggcaataacgtcgccgccgacctgatcggcgtggcgccgatgacctaccgacaacccaaatacgtgacctgcctcgacctcggcgcctggggtgccgtgtacaccgaaggttgggatcgccaactgaagctggttggtcaggaagccaaggacctcaagcatcagatcaataccgtgtggatctacccaccggccgccgagcgtgctggcgcgctggcggcggccgacccgttgattccggtggcctgaagcccgtactcccgggcgcccgccgctgttgttcaggcgggcatttttttgcggcattcatccattgatcgagccgccaccgcgcccatcaccccgcccaccatcggcgccagccagaacagccaaagctgtgccaggtaatccaccccggcaaacaacgccggcccggtgctgcgcgccgggttgaccgaggtattggtcacagggatcaggaccaggtgaatcaaggtcagtgccaagccaatggcaatcggggcaaagccaggcaccgcgccgggtgcggtgacgcgcataatgatgaagacgaagaaaaacgtggcgatcagttcagccagcaacgcggacttcatgtcgaaatgaccggggctgagcggaccatagccgttggcggcaaaaccgcccaccgcgaaatccggctgcccgttggcaatcaggaacaatgtggcagcggccgtaatcgcccccgcgacctgcgccacgatgtacggcagcacatcagcgccctcgatacggcgccccacccacaggccgagggtcaccgccgggttgaaatgcccgccggaaataccgcccagcgcataggccatggtcaacaccgtaagcccaaacgccagggaaacgcccacaaaaccaatgcccaacccggggaaagcagccgccaggatggcgctgccacagccgccgaaggtcagccagaaagtaccgatgaactctgcagtcaaacgtctttgcacaatcaactccattgcagctcaagtgccgtcgccacgggaggtgggcggtccggggcgacggtagcaatgggtatcaatatgtcctgtaagacttgtctggttttaacggcttacaacgccctgcccaaatttcctgatcgccaggcagtaaccgatcaacgctaccgccgccagcaacccaccggccgcgccgatccaggcgaagccgaactggctgccgacccaactgcccatcagcgcaccgccgccaatgccgatgttgtagatgccggagaacatcgccatggccacgtcggtggcgtcgggtgccagcaccaacaccttggattgcatggccaggccaaagcccatgatcgccatgccccagaaaacgctcagcaccaccaggtaggactcggcaccgctcaagggcagcagcaacgtcaggcagacggccaggataaacaccgcgcccaccacgaacaggtgcgggttgaaacggtgcaccaggctgaacagcagcgagccgatgatgcccgcgccgccgaacaccagcaggatcagggtcaccgcgctgccgctcatgccggccacgcgttcgacgaacggttcgatgtagctgtaggcggtgaattgcgcagtgacggtcatggcggtcagcacatacagcgccaccagcgccgggcgcttgaacagcagcggcaggctgcgcaacgagccggagttctggctcggcaacagcggcaaggtgcgcgccagccagaacaccagcgcagcggcgaacgcgccgatcaccaggaacgtggtgcgccaacccatggcctcgcccagcaagcggcccaacggaatacccagcaccatcgccagggaagtgccagtagccagcaggccgagggcttgcacctgcttgccttccggcgccaggcgtaccgcgagtgaggcggtgatcgaccagaacagcgcatgggacagggcgatgccgatacgactgagcatcaggatgccgaaactggtggcgacactggaaaggatatgactggcgataaacaggccgaacagcacgatcagcagcttgcgccgctccacgttgcgggtcagcagcatcaccggcaatgaagtcagggacacgatccaggcatagatagtgagcatcagcccgacgctggacaccggcatgtcgaaactggcgccgatggcactgagcagcccgacgggcacgaattcggtggtattgaacacaaacgcggccaacgcgagagcgaagaccggttgccaattggcttggggcgttgcggctgaaatgctcatggaacggcgcggtactctggcagtgatcaagcgggggcggtgatcgagcggccacccaggacaagcgccgccgccgagcattctataggtttccggcccgactgttggcgctcatcccgctcaaaatgacctcaaccgggtcagggtgccgtcatggtgaccacgtaggcgcccgattgaaccggcttgccgagggcatccaccagcacataccgctggtcgaaatagcgcccgttggggctgtcggccaccaacttgacgttgaccgccgaattgcccagcgcggtcacactgcgcaccgactgtgcctcgaactggctgccacgcagggcttgcgggcatccattgaactccactgtcgccccgcccgacgtactggggttacaaccgggctcgacgatgctgccgtgaaattgaatgacaccggaagatgccgccaggcatgcccccgtccataccgcaagaacaccggtaaccagtgacaaacgtaaaacgttcatgtcgacgctccttcttgggctgttaagaagtaagtcgtctggcccggcgtttacttgaggttattcgtcggtgtctgaaagaaaagttacgggtccacctgccccatcaattccggaatcgactccggccgattcgcataacgctgggccaacgccgcgcagaccatcaactggatctggtggaacagcatcagcggcaggatcagcacgcccatgctcgccccggcgaacagcacctgggccatcggcacaccggtggccaggctctttttcgaaccgcagaacaggatagtgatgcggtcttcctggttgaaaccgaacgccttgccgagcaccgtggacgccaccaacaccaggcccagcaacacgcagcacgccactaccaggccacccagttcccatagcgggatctggtgccagataccttcattcaccgcttcgctgaatgcgccatagaccaccagcaggatcgagccctgatcgacgaatttcagccaggacttgttgcgcccgacccactcaccaatccagcggcgggcgatctgcccggcgataaacggcagcagcaattgcacgctgattttcaggatggcgtcgaccgtcgagccgccgtcgccgtgcacattgagcagcagcgtcaccagcaacggtgtcaggaagatgccgaacaggctggacgccgccgcgctgcagatcgccgccgggatattgccccgcgccagggacgtgaacgcaatcgccgattgcaccgtggccggcaaggcgcacaggtagagcatgcccatgtacaggtctttgccgatcagcggcgacagcaccggcttgagcgccaggcccagcagcgggaacagcacgaaggtcaggctgaacaccagcagatgcaggcgccagtgcccggcgccggccacgatggcctggcgcgacagcttggcgccgtgcaggaaaaacagcagcgcgatggccaggttggtcacccagccgaaggccacggcggtctggccgctggcgggcagcagggaagcgagaatcaccgtggcgatcagggtcagggtgaagttatcgggcaggaaacgggggcgagtcataagcaggatcttccgggggttgccaagagcgtcatcgcgactctaacgtaacggcttgttaccgactaacgccaacgagccaacaaatgccgcctaaaggacatgccaacaccgtgcgccgtagcgtgccagggctttccagcctgccacggccggtgtatgggcgcaccgaatcgctgcccaaccgtgcgctgacccgccggcacagccacccatgggtgcaattgtcctacgcaatttccggggtgctggagatccagaccagcgttggccgtttcgtcgcgcccccccagcgcgcggtgtggattccagccggtgtaccgcatcgggtgttcagttcgccccacacagagatgcgcagcctgtacctggattgcagcgtcaccacctgggcggccgagcgctgtcatgtgctggcggtgagcagcctgctgcgcgagttgatccgcagtttcagcgaactgccggtagaatatgccgaggatgggccggacgggcgcctggcccaggtggtgctggaccagctggcggcggcgccgcacgtcgacctgatgctgccactgccgctggacacacgcctgcggccgatctatcgcagcctgagtgcgcacccggaacagcaaacgaccttgggccagtggagccagaaactgggggtgagcgagaagaccctcagtcggttgttcttgagcgacaccgggctgacgttccgcgcctggcgccagcgcctgcgcttattgagcgccctgcccgccctggagcaaggcgagcgggtcacggatgtggcgctggggtgtggctatgagtcgacgtcggcgtttatcaatgcgtttcggcagcaattcgaggccacgcccggcgaatttttccgctgacatcagctgccattgccgccatgggcctcttcgaagaagtagtccttccaactggcggccttgtttttcagcacgcccaatgcctgcaatttctcggcgtagatgtaggtacgctgcggcacgatggtgaagtcgatttccgggtcctggacgattttttccaccaggtccaacggcaacttcgactgttctacgcggatataggccttggctgccgctggtttatcggccttgatgatcgtctcggcttcggccagcgcggcatagaacgctttgtaggtcttggggttttcgtcgtggaatttctgcgtggtgtagagcacgttgaacgtggccggcccaccgaggatgtcgtaggaactgagcaccttgtgcacattcggattcaacagttcctggtactggaacggcgggctggagaagtgcgcgttgatctccgatcccccggcaatcagcgcggcggtcgcatcgggatgggccaggctgatggagatgtcgtcgaacttcttgaagctggcgtcgccgaactgcttggcggtctcgatctgcaaggtgcgtgactggaaacccacgccggcggcgggcacggcgatgcgatctttttcgctgaagtccttgagggtcttcacgttggggttgttggtcagcaggtagttgggcatcgagcccagggaggcgatggccttgacgttctgcttgcccttggtgcggtcccacagggtcagcattggcggtacaccggcagagactacgtcgagcgcaccggccagcagcgattcgttcatggcggtggcgccggaaatgctgttccactccacctggatatccaggccttgttccttgccgtgtttttcgatcagatgctggtcacgcaccacgtcgaggatcaggtagccgatgccgaattgctgggcgatgctgatcttgccttcggcctgggcgccgatactgatcagggccgtcgcagccgccaacagggtcagggaggaacgcttgaaagtcatgggagtctgccgcgtttttaagaaggtgatggagcctagcgacgtttttttagactggaaaagaatatctggatctattgttatgcaaatggcccacaaaccagcgcccggctgctattgtgccgcgctttgaaaaactgccgaaccagcgaggaaatggacgttgaacactgacgaaaaaatgaccggggacctgttcgaggtggataagcgcctgtcactcaaacccgtggtggacttcaacgcctacctgcgcagcgcgttcggcgacggcccgtgcagctgcatccgctgcaccagcggtaacggtgatgaaagcggctatgagttccagcacagcttcaccttcgacggcaaacccacccagcgccgcttcgccaccacggcgggcagcgatgtgttgcaagtgttgaagaaggcctggttgtcgtacaccaaggccgagctgccgttgagcggtgtgctggcgctggatacggtgaaggagtttgtcgagccgcagttgcacaagcggttgataccgctgtttttggccagtgggttggtcaaggacgtagacggagcgttgcaggttcagccgcaggcagcgtaagccacattttgtggagcaggcagatggttgtggcgagcgggcttgccccgcgctgggcaagcccgctcaccacaattacactgaagtgatcacttacgcgccgcctcccactgcttcagcaggtcaccgtaagccacggtctcacccttcggcttctcgttggccagtttcggtttcggcgcgcccggctggtcgaaccagtattgcgcgtcacgctcggggttcattttcgggccgcacaccggttgcaccttggagcgttccaggcgcgtcatgatcgcgtcctgctccttggccaggttgtccagcgcttgctgcggggtttgctcgccgctggcagccctggcgatgttgctccaccacaactgcgccaggcgtggatagtccggcacgttggtgccggtcggggtccactcgacacgggccgggctgcgatagaactccaccaggccaccgagtttcggcgccatgtcggtcatagcctgggagttgatgtcggactcacggatcggtgtcaggccaacgatggttttcttcagcgagacggttttcgaggtcacgaactgcgcgtagagccaggccgcaagtttctgtttctcaggtgtcgacttgaggaaggtccaggagcctacgtcctgatagcccttcttcatgcccttttcccagtaaggtcccacaggcgacggcgccatgcgccatttcggcgtgccgtcggcattcaccaccggcaggcccggcttggtcatgtcggcggtaaacgcggtgtaccagaagatctgctgggcgatgttgccctgggacggcaccgggccggattcggagaaggtcatgcccgcggcttccggtggcgcgtaggctttcatccaatccacgtatttctgtgtggcaaacactgcggccgggccgttggtgtcgccgccacgggtgacgctggagcccaccgggtggcagtcctccacacgaatgccccactcgtccaccggcaagccgttgggcaagcccttgtcgccgccaccggccatggagaaccaggcatcggtgaagcgccagcccagggacgggtctttcttgccgtagtccatgtgcccgtagacacgtttgccgtcgatttccttgacgtcttcgctgaagaacttggcaatgtcttcataggccgaccagttcaccggcacgccgaggtcatagccgtatttttccttgaacttggctttcagctccggacgctcgaaccagtcggcgcgaaaccaatagaggttggcgaactgctggtcgggcaactggtagatcttgccgtccggcgcggtggtgaaggagataccgataaagtccttgatatccagggtcggcgaggtgaagtccttgccttcgttggccatcaggtcggtgatggattcagtcttgccgtagcgaaagtgcgtaccgatcaggtccgagtcgttgacccagccgtcgtagatgtttttgtcggactgcatctgggtttgcagcttctccaccacgtcgccttcctgcaacaggtcgtgggtcagcttgatcccggtgatttccgtgaaggccttggccagcaccttggactcgtactcgtgggtggtgagggtttccgacaccacgttgatcttcatcccacggaacggttcggcggccttgataaaccacttcaattcctccagttgctgatcggccgtgagggtggacggtttgaactcgctgccgatccattttttcgcagcatcttcgtacgcatcggcccaggccgaagcgctcaaaccgctcatagccagtacggcggccaatgaaatgctatgtcgcagcttattgttcttattcaacatagagacctcctggttgtttattcataagggcactagccccaacgcatcacactcaacagccataccagggagagcgcggacgctacccagatgctccagtcggtaacgccgatcaccagcaaatgcaggtaggcgctgccgagaagaccgataaacaaacgatcaccacgggtggtgctgatcggcaaaaagccccgccgggggatgctcggcgagcgcagttcccaagtggtcatgcccgcaaggatcagggctatgccgccaaagaacagcgcggtgggggtggtccaggccatccattccatcatcgactcctcagacccggcccagggcaaagcccttggccacgtggttgcgaacaaaccagatcaccagcatgccgggaaggatagtcaacacccccgccgccgccagcacgccccaatcgatacccgacgccgacaccgtgcgcgtcatgactgccgcaatcggcttggcgttgaccgaggtcagggtgcgcgccagcagcagttcgacccaggaaaacatgaagcagaaaaacgccgtcacgccgatgccggagccaatcaacgggataaaaatcttcacgaaaaacttcggaaacgagtagccgtcgatgtaggcggtttcgtcgatttccttgggcacgccggacatgaacccctccaggatccacaccgccaacggcacgttgaacaggcagtgggccagggctactgcgatgtgcgtgtcgaacagccctatcgacgagtacagctggaagaacggcagcaaaaacaccgccggtggcgccatgcggttggtcagcagccagaagaacaggtgcttgtcgcccaggaaccgataacgcgaaaacgcataggccgccggcagcgccacactcagggaaatcaccgtgttcaggctcacgtagtacagcgagttgaggtaaccggtgtaccagctcgggtcagtgaagatcaccttgtagttggccagggtgaagtcctgcggaaacagcgtcagcccgccgaggatttcggtgttgctcttgaaggacatgttcagcagccagtagatcggcaccagcaggaacaggatgtagaccagcagcgggatcactttcttcataaacgtaagacgtttgctcatgttggcggcctcagcggttggcgtcggagtgggtcatggcggtgtagaacagccaggacaccaacaggatgatcaggaagtacaccagggaaaacgctgcggccgggcccaggtcgaattggcctacggccatctgggtcagcgtctgactcaagaaggtagtggcgttacccggtccaccgcccgtaagcacgaacggctcggtgtagatcatgaaactgtccatgaaccgcaacatcaccgcgatcagcagcacgcttttcatcttcggcaactggatatgtcggaacaccgcccagggcgatgcacgatcgatccgcgcggcctggtagtacacgtccggaatcgcccgcaaccccgaatagcagagcagcgccaccagtgaggtccagtgccagacgtccatgaccaacaccgtgacccaggcgtccatggtgttggcggcgtagttgtaactgatgcccagggcgttgaggctgtaacccagcaggccgatatcggcgcgaccgaagatctgccagatggtgcccactacgttccacgggatcagcagcggaatggccaggatgatcagcaccagcgacgaccagcggcccttggtcggcatggtcagggcgatggcgatgcccagcgggatttcgatcagcagcacacaggccgagtagatgaactgacgcagcagcgagtcatgcaggcgcgggtcgagcagcacctgcttgtaccagtcggcaccgacgaagtagcggctggactggtcgaagatgtcctgcaccgagtaattgaccacggtcatcatcgggatcaccgcactgaacgccaccagcaggaacaccggcaacaccagccaccaggccttgttgttctgcaccttgttcatggctgcacctccagcaggtagtcgtcggcatacaccatcagccattgcgccggaaagctgatggacgccttgccctcaggcaccggcttgtcttcggccaggcgcacttttagcagcgcgccatcgaggttgagagtgatgatcttgtaggtgccgaggtcttcgaggtgagtgacatcggcctgcagggcgtcagggttgtactcgtcccagacatggatgaattccgggcggataccgacctgcaatttcttgtagtcggtcgtggcaatgcgttgctgcacggcctcggacaagggcagatgggtgccagcaaagcgcaccccgcccgcctcagcctgcacctcgatcagattcatcccagggctgccgatgaaatagccgacaaaggtatggctgggccgttcgaacaggtcacgcggcgtaccgaactgcacgatctggccgccgtacatcactgcgatcttgtcggcaaaggtcgaggcctccagttgatcgtgggtcacatagaccatggtgatgttgaattgctcatggatctgcttgagcttgcgccgcagtttccacttgaggtgcgggtcaatcaccgtcagcggttcatcgaacaggatcgccgacacgtcgtcgcgcaccaggccccggcccatggagactttctgtttttcgtcggcggtgaggttgcgcgcctttttggtcagcaggttttgcaggtcgaggacttcggcaatttcctgcaccttgctgtgaattttcgcctcggccatgccctggttacgcagtgggaatgccaggttatcgaacaccgtcatggtgtcgtacaccaccgggaactgaaacacctgggcgatattgcgtttttccggggtgaggtcgttgaccacttgggtgtcgaacagcacctggccttcggaggggctgagcaggccggagatgatattgagcaaggtcgacttgccgcagcccgacggcccgagcaaggcgtaggccccgccctgctcccacacgtgattcattgcccggatggcgtagtcctcaggccctttcggcgcagggctgtagctgtgcgccaggttctgcaaatggatctcggccatcaggcaaccctcgcgacacggcgcccgggggcctggaccaaccggccctggccatcgaacacaaacagtttatgggtggggatatacacgcggatcggcgcgtcgacgtcgtattcgtgcacccccggcaggtgcagcaccagcaggaagtgctcgctgcgcacatgcaggaaggtttccgaaccgctgatctccgcgacttccacggtgaccgccagttccaggtcgtcatcgttgctcggcaccaggctgatatggctggggcgtacgccgaaccggaactcgccttcgccgatgggacgcaggtcgacgttcagcgggaagtgcacgaaattggcgaagctcacctcgttgccactgatacgccccggcatcaggttgatcggcggctcggaaaacagctcagcggccaagacggtctgcggctggtgatacacctcggccgccttgccgctctggatcacccggccttcgtgcaggatggtggtggtgccgccgagggccagggcttcgttgggctcggtggtggcgtagatggcgatggtgtggcgcgctgcgaacagttcgcgcatttcctgacgcagctcttcgcgcagtttgtagtccaggtttaccagcggctcatcaaacagaatcagctcggcatccttgaccagcgcgcgcgccatggccgtgcgctgctgctggccaccggagagttccagcgggtgacgctggaggaatttctcaatgcgcagcatttttgcggtttccagcactttgctctggatcagttcgttggacacaccggcctcgcgcaagggcgaggcgatgttttcgaacacggtcatggtcgggtagttgatgaactgctgatacaccatcgacacgttgcgcaggcgcaccggtttttgcgtgacgtccacgccgttcatcaggatgcggccgctgtcgggcttgtccaggccggccatcaggcgcatcaggctggtcttgccggacagcgtacgaccgagcaagacgttgaaggaaccggcttcgaaacgcaggttggcgtcgtcaatccaggtctggccttcgacaacgcgggagacatgttccagggtcaatgacatgacacgacctttttattattggaatgaatctggccagatgacagagcgagtttcatgccaaaacggcaagttattgatgtgcaaggaaatggcgtaaatgggatgttcgggagtgaacaatctgactgaacaactgaacaatccgggggttgacaatgaacagttctgaacaacactctcatgaccaacacagggcaaatgtgggagggggcttgcccccgatagcggtcagtcagatacagattcatcgactgaaccaccgctatcgggggcaggccccctcccacattgacccggttccaatcgttaaatagtgcaagaccccataacaataaaaacgaaggtcaccccatggccgaaccactggctcacgacacccttatccaggaatcctggcgccgttgccgcgcctttggcctggaccaccagagcacgcccagcttcgatcaactgcctgccgagggcatcagccaattgctggagagccagcattcgctggtgcagaccacccaccaggaagtgctgccctactacgagaacatcctgagcaattccaactgcctgatcatgctggccgacaaccaaggccaggtgctgaccagttggggcacccagcgctttatcgagccgaagctggcccgtggtttcaacccgggagccagctggatggagcgcgccagcggcaccaatgccatcggcactgcgttggcctgcgcccaggcggtgcatatcgaacacgatgaacacttcctgaaggccaaccgtttcatgacgggctcggcggcaccgatcttcgatgcccagcgcgagatcatcgcggtgctggatgtgtccagcgacagttacctgccgccctcccacaccctgggcatggtcaagatgatgagccagaccgtggagaaccggctgatcctcaacctgtttcgcggcgaacacttccaactgaccttcaataccgggctgagcaacctcgacagccagtgggccggcctgttgatctttgatgagagcggccaggtgctctcggccaatcggcgtgccgacaacctgctgggcatcagcctgtcgcgggtgatgatcgacagcctgttcaaggtgtcgttgctggaactgttgaaccagccggaaggcctgcccttctccctgcaagcggcgggacgcaaccgcttccaatgcttgttgaagcggcccaagcagacgccggtgcaagcgcgcgtgttcaccgcgccggcgccatcgaagcctgcgccgattggcctcaagaccttgcacttcggcgacgcgcgcgtggagaaagccgtgcgccaggccgagcgcctgctggagaaggacatcccgctgctgatccatggtgaaaccggcgtgggcaaggaggtgttcgtcaaagccctgcaccaagccagctcgcgcagccataaggcgtttatcgcggtgaactgcgcggcgattcccgccgagctggtggaatctgagctgttcggctacgaaaaaggtgcattcaccggcgccaaccagaagggcagcatcggcctgatccgcaaggccgacaagggcacgctgtttctcgacgagatcggtgatatgccgctgcccacccaggcccgcttgctgcgggtgttgcaggagcgttgcgtgcaaccggtgggcagcagcgaattgttcccggtggatctgcgcatcatctcggccaccaaccgtgcactgcgggagttggtgcaggccgggcgtttccgtgaggatctgtactaccgcatcggcggcctgaccctggagctgccgccgttacgcgagcgcaccgataaacaggcgctgttccagcaactgtggcagcagcaccgcgagccgactcaatgggcgggcctgagcgccgaagtgctggcgctgttcgagcagcacccgtggccggggaatttgcgccaggtgagcagtgtgttgcaggtggcgctggccatggccgaggaacagccgatccgtgccgagcatctgccggatgatttcttcgtggatctgaaagttaccgcgccactgcccaccagtgagtacctggatgacagcatcgacctgaaccagcgcttgaaggccgccggcggcaacatctcccacctggcgcgggagctgggggtgagccgcaatactctctacaaacgcctgcgccagaacgaaaactagcgcggcttgaccaccaccagcagatcggtgaagtactccacctgaatcggcaggttatcggccagcgacgacaacgccgccgccgtgtcgtccagcttgaacaccccggatacccgcaggttttgcagggcctgggggtcgaagcgcagcatgccgtggcgatagctggcgagggtttgcaggacttcgctcaggggttggtcgttgaccttgagcaggccccgggtccaggcgtcggggtcgctgtcgccaatggcttgcggcggctgggcacgaccgtggtcgagcaccgagcgctggccggctgtgaccttgactccttcgttgctttcacctttgaccgctaccgtggattcgatcaccgtgaccagcgtggtgccgtctgccgcgcgcttgaccagataacgcgtgcccagcgcagtggccgtgccctggtcggtacggaccacaaaggggcgttgcgcatccttcgccacctcgacccagagctcgccttgcagcagttcgatcacccgttgatggccgtcgaacttcacatccactgccgagttgctgttgagctgcaactggctaccgtcttcgagggcgatctgtcgccgctcaccgacaccggtacgctggtcggccatccacaccggcaggtgttgcaggcccagccagccgcaccaaaccaggccgagcacgcccatcacctgcgcgccacgcgggcgtcgcggggtgaaggcgcggttcagggccatgcgcgcgggcttggcgggcaaggcatcgaggctgccccataacgcactcatgcgctcgatggccacggcgtggcgcgggtcggcctggcgccaggcgttgaacgcctggcggtcggcgtcggtcacgccttcgtcgtgcaggcgagtcagccactgcgctgcttgctggatgatctgctcggaactcatgccagcgggtctgccgggtgcaggctgtggtagcaatgcaccagggcgctggaaatgtagtttttgacggtgctggaggaaacgtccaggcgcagggcgatttcgctgtaggtcagcccgtcgaggcggctcaacagaaacgcttcgcgggccttggcaggcaggccggcgagcatctcggcgatgcgttccagggcttgcagcgccacatgaatcgcggccgggtcgggcatgccggcgtcttcacactggatcaccagggcttccatgtaggctttttcgatacggcgacgacgggcgccgtcgatcaacaaccggcctgccgtggtggccaggaacgcgcgaggttccttgatactttgcggctcggccagcatcagcacgcgaatgaaagcgtcatgggccaggtcggcggcatgctgggaacacccgagtttcttgcgcagccagccgtgcaaccagccgtggtgctcgctgtacatcgccgtgagggtctgctggcgaacggagtcgcccagcgcggccggaatgtcatgcatgcgcaaaaatatctcaaatgggaagagttaccaattgcgcgaacaatgccagtaaaacctgcttggggcaagggcctgtctttaacgccaactccaggacacgccggtatagatgccacgaccatccgccggcgtagagcgcgctacatccaaccccttgtcgtcataacccggcgtcacggtattggcgtaacgacggttggccaggttgcgcaggtcgacccaggcttgccagtcctgcttgggcgcgtcgtagccgaacgtggcgccgagaacggtgtaggacgcggcatagtaggaattggcgtagtccaccgccacccgcgaggaatactcggtgttgaggctggtgtagaaacccgtcggatggctgtagcgcacttgtgcctggtagtagtgcttggggatgcccggcaaggtgttgtcgccgaagcggtcatcgtcacggtagtgaaagtcactgaaggtgtaggcctggcgcagggcaagctggccgttgcggccgccgtcccacagtgggctgagcaggctcagttccacaccctggtgcaccgtggggctggcgttggactcggcgacgatggcattgctggtggaggtttgcgcctgggtttcaacggtgagcagttcgtggcgcacttcggagcggtacagggccaggtcccattggccgagccaggcctcaccgcgcccgccgatctccagagtggtggcggtctggtttttcaggctcacgccctcccgtgccaggcctttggctggaccaccggtaaagtatttgttggaaccccagatcatcgaccacgcatgcggcggctcgaccgagcggctcaggttgccgtacacctgcaattgcggggtgaagtcatagcgcaggccgatgcgtggtgcgtagtcccagtcgtgctggctgagcggcgcctggccttcaggataggtgacctgggtttcgcgacgcgtgtagatcgccgccaggccggtggtcagccacaggtcaggcaccagctccaggtcgttgccgatatgcagcacggtgtcggaacccaggtagctgtagtcgcgggtcttggtgccgggggcgtaggttgctgtattgccagcgggcgtgcgcacgtattccgaagcgccgttgttgggcatcgcctgggtggtgcgcaggccgacagtggttttactgtcatggccaaacagcgtgtcctggcggatgtaattgagggtgctgctgatatcggtgtaggcgactttcaggcggttggtgccttcgcgcaggtccatcgggtagtcgtggtaggccagcccgacttcgacccgggcgttgtcgtccaaatgcaaggtggtcttgttggcgatccaggtggagcccggttgcaggcgcttggaatcacgggctgcgttgaggctgttggccgcacgcgggtcgtggctgatctggctgcgcgtgagcttgcctggggtgtcgttggtggtttcgcggtaacggaagtaaaagcgggtttccaggtccgggttgaagcggtagccgaagttggcggccacgcccttgccggtggcggcgctctggcgctggtagccgtcggattcggaatcagtgaggctgatgtagtagtcggcatcccccagcacctggcctgaactgatctcgcgctgggcataacctttgctgcccgcttcgtaacgcagttgcagcttgggcgcgtcgtagcccgtgcgggtcacgtagttgaccgcgccgcccaaggccagcgcgccctgatcaaaaccgttggcgccgcgcagcacttcgacttggctttgccacagcgggtctttcagctcatagggcgtgccgccggggccggtgagtggcaggccatcgaacatttcatataagccggaagcatgggaaccgggactacggttcaggcccgagccgcgaatcgagagtttcaccccttcgttgttggccgccttggcatacaccccggcctggtacttgaacacgtcttcgttggtgctcacccttccctgctgcacgctgttcatgtcgatatagttggtgccgccgggcacgctcttgagctgcgcctgggccacttcaccgtcgctggcttggctgctggtgacttcaaccggagccagttgcaggtcttcggcgtgcaccagtgagcttaaggtcagggcggcaaacaggagcggaggttggcgcagcagcatcgggcaggtccttggaattcggggggtacgtggtgggaagacaggggcgcccgccaggtcactccttattaacggaccagacccttcctacaccaacgtcggaccgagactattctctgcaggatggtggcagagcagtaggaagtggcgagcgcgcttgtcccgcgttgggctgcgaagcagccccaaaaacagcagccgaagagtgcctgactcaccgcattcttccttccagggtcgcttcgcaacccaacgcgggacaagcccgctcgccaccgatgcagtgttcgtctttaatgggagggtatcagccagatatggccggtttttcaaagaccttgagagggatggcttttaagcctgggaggtttgcgatttcaacctcccgaaaacgcatagattttttcagcagctcacatacagatcactttggggtcgctgtctgttcgaaattgcgaccaacctccccgcgtcgaatgtatcacttggttttgtatcccaggtaaggcagtcgcctgtacgttgacgctttggcctcctgggctgttttctgtgaaaaatctgaagctgatatgacaagtatggggcttatcgtccgtattggtcgcaaacacgtccaatccggactggtcttggcggaccgcagtcgtaaccgcgctggccatcgttgaaaacactactgcaagtgcgcctatcagtaatttcttcattggaaacgtctccgttcattgatcgaaatactgtgaaagccaaactgcagcacagtaacgtcaactgtagctgaaagagcccctgccattgggcgtggcttgaaaatatggccattagccgctatctatacgccctgcgtttaacccgttctgttacacctcgtgaaccacccgcgagcaacggccgagcatggacaggcgaaaaaccggctttcaaaccgagtagggcaagcgaacgtcaaatgagcgaaaagaaacagcaattcagaaatacgtgcatattttgcaaaggtaataaaacctcaaacgagcacattttcccccgttggttaaggcagttcatacccatcgaacggggaagcgacgataaaagctaccatcgcacactggtcacaaaacaacctattgggggtgcatcaacagaagttttcccaaaaaacaccagcaactcggtattgagtactcagaccaagaaagtttgtacaacttgcaataaccaatggatgagtagattagagacagaaatgatgtccctctatgaaaaactacatcgtcaatcgctcaccaccttatcgatggatgaccaacgagccctcagtacgtgggccattttactggcgataaaatgggacctcactgaagtcaacacttcagggtattcagaacgacacacgcatcatgtgttccagcacaagaccccgccacctaacacgaggatttggctgggctactgtgaagacggtcaagtggaaatcaggcataggacaacggttttgctcaaggccaaaccgacacaggcacatccgattaatgttcgatcaacagcgataatgctcggcaccttggtgttgcacattcttagccatgaaacgtccagttatccaataatagtggatgccaacaaacgcaacaaaaaaatggtcttgatatggcctacaacacaagaacttgtcatggatcgatcaatgctcgaaaaagtcacatccgaaaacctgaaatcaatgtctcacttcctaggtatgcagcacagctaccgacacgttgtatcgcttattgcctcactgccagaactttatgctcaaacataacgtaacctgacctgttgacatccgcccgctaggcctactttccagtttggcccaatgctcgcatcagctcctctgcttccgaccctggcggaaggcggaaaccgaacatttcatcagcggccagaatctcgcccaccgcgtcgagtaattgcgcctcggttggcgagtcacgcagcagcttgtgtgccgccagtaacaattcggcgcaaacgccttggacactcgccgcatcgatcacggcaaaaaggataaaacgcaaacgtatttcgcgatcagtgggccaaaccgttttttgcttacccatggtagaggcctcaagctttcggaaaaatccgaggctattgatggcttgagggtgtttcaagcatcaggaggcaagataggtcacttcctacagaagaaagggaaacaccgtaccaatcatcaaaggaagccaggctttattgcaccggcagaaagttcatcagcaataggctctgcgcgtaattgagaccgatgcgccggtagcgttcgtcaagcatctgggtcagcaagtcgagtcgcgctacgattttgccgaactccaccgcgaagctgaggttgctgccctcctccgatatctcgttggagaacaacagcagcacgccattggcatcctggcgcttgctcagcagccaggtggccttctcgatgttgcgtgcggcgttgctgacgaactgcgggttgatcgaatcggtgatgtagaactcggtgcgcccaccgtgggcggtcacgatcatgctgccgatggcgtagataaatgcgccgacgcggtcgcctttgaactccgcactcagggaataactcagcgccgccaggtcacgccgatcacccagggccggcagcgatcgccgctgctcgatggcctggcggatctcgcgcgcagcggtgaccgcatccggatagcccgactgacgccattggctggggttacgcaggtagagcttgctcatcagcagatacaggctttgcaggttgtcgcgcatgccaagcgtggccatgcggtcgacactggtctggaagaactcatcgggcttgccgttgctgaactgcttggcgatatcccgcccctgttgctggctgcaaccgccagcgcagagcatcaacacggcggccagcagcaagggctggcaacagcgcggaaggttgaaacgaagaaacgtgcgatccatcggcacccgatctgattcatctgcccacacgggaaatcggcagggctgggacaaggatagagcggagaaatctaaaaaagtgcagtggaccccggcagatagttgtaagcagagaccaccgggcaggtgaatcggcgcaatcgtgaaggattcgtttcagggcctatactgaaggcaacagcggcgtgtgttgttggcgcatttgctcataagcagctgtataggaggtgacggcaatgaaacatccaattcgggcgcaaatggttgttcagatgatttgcctgctttcggtggctcagcttttttgctgaaaacgtgtcaccggtgtcaaattcagccgtggttgcggcgctgggaggtattgtctgcaacctcctcagcaactggcccgcccccattggccgggccagaacgtgcaactacaacaagaccgtggccagcatgcctagagcccccaggcaaaacccgatcagggcaccccgcccgggtacttcatggaacagcgcccagatcaccacaggctccagcagcaataacgaggtgatggatacgactgtcaccacccagatatcaccgaccgcacgataccccagccagtaagcccccagcagacacagcccggcaaaacacatgaccaccaccggcatgatgaacgcctgccatgaaccgtcgccggcctgagccagcctggcggtgattacctcgctgtagattgcacaaaactcaccaacgaccatcaaccctagagcagaaactccgagtagttctttggacatatcaaaaactccttcgtattcaacgcactgtttttcaactcccagcgggcgatgccgttgccgaggttttcgttgcagcgatacgaagcagccttgaacaggcctgaattaccgaagtgcttttgcatgctcgtgtccttgaaaagggggtgaatcccagcgaccgtagaggacgcccggcctgatcatacgtttggtcaagcgctttgaacaacctgcgcagggcatccaaaattcacaagacgcctagtcgacactcggcctgttcaggctatgatcgccccctatgaaccagaaggctgactgcccatgcccgttgacctggaagccctctatcccaaactgatccacctgatgctggatacagtcttcgtcgtcgacggcgacaaccagattgtgttcgtgagcgatgcctgtgaggcactgctcggctacagcgccgatgaactggtgggcacacccatcacccactacatgcatcctgacgacctggcacgcacccgagcctccattgtccgggtcatgaacggccaaccccatgtcgacttccgtaatcgttatatccgcaaagatggcagcgtcgtgcacatcctgtgggcggcgttctggtccgaagaagtgggcgcgcgcatcggtgtcgcacgggacgtgaccgcactcacccaggccgaagaggagctgcgcttcctcgcccaccatgacccgctgacagccctcaccaaccgttcgctgttcaatgcccggctggatgacgccttgcataccgcacggcttcacaaccagcccctggcgctgctgttcctggacattaatgatttcaagggcatcaacgatgtgcatggccacgccatgggcgaccgcctgctgtgcgtgattgcacgacgactggagcgctgcgtacgcgaaagcgacctggtggcccggatgggcggggatgaattcaccgtactgatgaccgacatcccctcacaggatgcggtgaccggcaaggtcgcgcacttgctcgcggtaatggccgagccgctggggccggagtttggcggggtgaaaatgccgtcctgcagtatcggcgtggccttctatccacggaacgggctggatgccgacacgctgttgagtcacgcggatggggatatgtaccgggtgaaaaggcagcggtttgcgacggattgagaccgatcaacaccgcgcgcgccgattaaaagccaatgccccgacgtgtcggggcattggcttgtgtagtcatgggataatcaaccagaaacgaacatcttttcagaagtttcaactggcaaaagattcatcccaacgtggaatcattatttggcttggcgaagcacaagctccgtcaaacgagtcttgacccggaagcagaactcacgaatttgaaattgataagccggcatgaccatgtagttcaaatcaggacccaacgagtctttgacttccatgtacttagcggtcttggcagcaatggcctggtattgcgcctcgtatttatcgtacgacgctttgttgtacacccttagaacatccagctctttacggcattgctcagcgcgattctggttcaagtttgtttcagactcttcctgagctgcctcctgggagacatggattggggctacaggacgtgggttcgcaggtgcagcctcataccgtacagtgaaattttctggtggtgtcgaaggtgcggcttcagcgggtgcctcatggacgacggctggagggggagtctctttaggtttttctggagttttcgtagcgcatcccgagagagcaagacctaccactacaacgatgccacacattttattcatcggtttcaccaagaggtatttggggttggctgagtcgttaggttctgggtaaaagtcatcactcaatcaatgatagagcgtacattttctaccagactcaaggcgctcagccgctcttccttgagtgcgcaggtgagcaatagtagtaaaaaatcaaagagatgacgaggaaaagcttggcgggaagtgcacaaacccaatgggataatgactgtgcggctttgcttctctaagttcgacgacgcccacatcactcggatgcctgcacccggtaattgggcatggtcttcgttgtgaatactgccggtgtcggtgaggatctcggcttggagtcattcccatacttcgagagccggggttaggcgaatgccgaagtcggataggccggacagctcaagctgtgacgatggagggtatggcctgtccataagttaccttgagcttgaaatagtggcgcattgccggtattcatggcgacttcaaaaagtaaggacgctgatactcatgtcattcgtcaaagccggctcactcttcgtatgccttttgggcgctgcgtcgctcaacggatgcaccgtgggccctcaagcaacgtggaccaacctgggccccggtgggatagcaaccaaacgcagccaaatcgcctgctacacagacgcaaacatcatcgacgggaagcgagtggaaggcacattatgcgcgtttcctacgtccggattcctgagcgacggcgagccaaccgtaatcgcaagaatgggctatgggcagcaatacactttggaattcagcaagacgcttgcggggtttgaactaccattcggcgacaagaagggagttctgaaatgcgaacctatgaagactgagcctggcaggacaatacctgagagcttttgcactctcacggtcaacggccagaaattggtcagcgctaagatactgtttggtggcatgtgacaaccacccgtgccgcactcacctgcggcacacctaaatctacacagtcttcagtagcccgaagcggcttacgctccccactgctggttataggccgcgacgtgctcaggaaagacatcaccgtatggtggatactcgattcctagaacgctcaactctattgcgtcttccccgcaatcaaacgagtagtccgcaatgcacacaccggcagcccgaatcgcctctccgcccacaatacgcactgtaaaattaaaatgtctctgatcacgctgagcaaaggctctgacttgctcctggataatggaatatccaggagcaggaacaaatacgccgaacgccacccccatgggcggatcgccgagctctaaatcggaccaaccgataggctgcccattactgaaagcttcgaatcgcagcatggaaatgacctatcaggcactgctaaatttcccgaagaataacgcatcagcttgatagcgggtattcaggaccgcgggcgtggtcaccactctgcatcatggttgcgagtgcccatgaactggtggcaaggaagtatgctgcggtaccaacatctcccaagctgatgtaaaaaagtactattgcccttgcaagccttcactggattcagaccaacacatgcagatcatccgcactggaacggttttaactggcgaatacgctggttggacaatagaaattcaggatgaccgcgcaggtgaaacgggtggttattacctgttcatggtgcaggacgaatccaatggtttcgattcttggtttgagcgcatagagcagctgcagcaacaaatttcagaactcgacgttcgctggaattagcgtctcactcatgcgctttccttttatccctccccttcaacgtcagccgctatagcggcaagacccaaggtggtatcggaaatcatcgatatcggcgacgccagcctactccagggacacagcgagcaggagatcaccaaacgggtttacagaaggattggcgccactgccaaaccatcaaaataggcaaagtttcggaacgcctatcaaaaaccggcgttacctacccaaaccccagaaacacaaaagccccgctagtgcggggcttttgtttgaatcttggcgggaaaccagggattcgaaccctggagacgctattaacgtccgccggttttcaagaccggtgcattcaaccactctgccaatttcccttgtgcatcacaggattatagtagcctatcccgtctcagcgggcgccataatacccgaatgaaacacactgtcaaactctcgccatagcttgttacagagcgtctgttatgatctttgcgactgaacgtttcaaaactgaaggagtgtcgccatgcgcgaacagaattacgcagtgaatggtaacgcgcaggctgagcagcttgaagtcagccgcgtgttgcgcaacacctatggcctgctcgcccttaccctcgcattcagcggcgtgatggcgttcgtggcccagcagatgcgcgtcggctacccgaatatctttgtggtgctgatcggcttctatggcctgttcttcctcaccaacaaactgcgcgactctgcgtggggcctggtgtcggcatttgccctgaccggcttcatgggctttatcctcggcccgatcctcaaccgttacctcggcatggccggcggcgcggaagtggtcagctcggcgtttgccatgacggcgctggtgtttggtggtctgtcggcctacgtgctgatcacccgcaaggacatgagcttcctgggcggcttcatcaccgctggtttcttcgtgttgctggcggctgtggttgcgagcatgttcttccagatcagcgggctgcaactggcgatcagcgcaggtttcgtgctgttctcctcggtgtgcatcctgttccagaccagcgcgatcatccacggtggtgagcgtaactacatcatggcgaccatcagcctgtatgtgtcgatctacaacctgttcatcagcctgttgcagatcttcggcatcatgagccgcgacgactgattactggctgcaataaaaaacgccccgtatcgaaagatgcggggcatttttgttttcagaaggtcagtactggttgggttccatttccagctcgaccttgaagcgctccagaatatcacgctggatgcgccgggccaggttggcaatgtcgtgccccgaggcaccgccatagttgaccagcaccagcgcctgcagcttgtgcacgccggcatctccttcgcggaagcccttccagccggccttgtcgatcagccagccggctgcgagcttcatctgcccgtcaggttgcgggtaagccaccaggtccggataaagtgcctgcaactcggccgccagcacctgggacaccaacgggttcttgaagaagctgccggcattgccaagttctgccgggtccggcagtttttcgcggcggatgctgcagatggcgcggctgacgtcgctcggcgttgcctcgctgatcccctgcgccgccaggcgctgctggacggggccgtagtcgagtttcaagtgactggcgcggctgagggcgaagcgtacgcgcaggatcagccagcgtccggtctcgtgcttgaacaggctgtcacggtaggcaaagttgcattcctccaggctgaagtcgcgcagttcgccggagtggcgatccagggcggtcaggccggcgaatacatccttgatctcgacaccgtaggcaccgatgttctgcatgggcgcggctccgacggtgccggggatcaggctgaggttttccaggccgcaaaagccctgttccagggtccacagcacaaaggggtgccaggcttctcccgcctcggcctcgaccaccacgtgcaggccatcgtcgtgcagcacgcggatgccttgggtagccatgcgcagcaccagcgccggaatgtcctgggtcagcaacaggttgctaccaccgccgatcaccagcagcggcacattgtgtgcggtggcatatgccagggcctcgcgcacatcgctgtcgctgtgggcctcggcgaacagctgggcacgtacgtcgatgccgaaactgttgaacggcttgagcgatacctgcgcaagcacctgcaaggtcataaccgccccttcaattcgatcaccaataaatcacaggcctgctcgatcaggtccaggacccgttcgaagccttgttcaccctcgtagtacgggtctggcacttcgtccacttcggcatcgtaacggcgcaggaacaggtccagctccgccttgccctgccccggctgcatggccttgaggttgcgcagattgctgtggtccatggccaggatcaggtcatagcgcgcaaagtcggcgcgggacacctgctgggcacgctgggccgacagatcgtagccgcgcgccaacgccgcacgctggctgcgctggtccggcgggttgccgatatgccactcaccggtgccggcggacgccacatcgacctgccccgccagccccgcttcgcgcagtttgtggcgcagcacgccttctgcggtgggcgagcggcagatattgcccaggcagacaaacaggacctccatcaggcccccagcaggcgacggacgcgctcaaggtcttccggggtgtcgacaccggccggtggcgcttccagcgcatcgcccacatggatgcgcacgccgtgccagagcgcccgcagttgctccagggattcggtattttccagccagcacgggccccaactgacgaagtcatgcaggaaacccgcgcggtaggcgtagatgccgatatggcgacggtaaggcacgccttccggcaacacgtccggttgcttggcgaaggcgtcacgtgcccacggtagggtcgaacggctgaacgtcagcgccagaccgttgatatcgctgaccaccttgaccacattcgggttgaacagggtctcgatgtcttcgatcggctcggccagcgtcgccatgcgcgcttcgccatgggcggccaggttggcggccacctggtcgataacaccgggtgggatcaacggttcgtcaccttgcacgttgaccacgatggcgtcgggcgccaggccgagctgtgtggcgacttcggccaggcggtcggtgccggagttgtggtcttcgcgggtcagcaccgcctcagcgccaaagcctttgcaggcctcgatgatgcgcgggtcatcggtggccaccaccacacgctcggcgctgcttttgcaagcctgttcccacaccagctggatcatcggcttgttgccgatcagttgcagcggtttgcccggcaggcgggtcgacgcataacgggagggaatgacaacggtaaaggcggtggtcatttatccaggcgctcatcggtggtcagggtacgggcttcgctttccagcatcaccgggatgccatcacggatcgggtacgccaggccggcgcctttgctgatcagctcggttttgtcggcgctgagcttgagcgggcccttgcagatcgggcaagcgaggatgtcgagcagtttggtgtccatgagtgtttcctgaaaaaagcggtttaaggcaaaagacgggcgggcaacaggcgcatcagctgcgtgtcgaaccaggcgacgaacgccggcgacggcagcgcatccaccgcaaggtaccaccagtcgggctgggcaaaggcgcggcacttcaccgcgtccttttcggtcatgaccagcggcaatgacggcgtaaaattcaggacctcggcactgtagggcgcgtggtcggcaaatgcatggggtatcggctgccagtgtagcgtttcaagggtgttgaagaaacgttgcgggttgccgatgccggcgaccgcatgcacctgctggcccggcgcaaaatgatccaccggccggcgctcgccggtttgcaggttgaccagtgcggtgggctgcaaacgaaaggcaaagccgtcctcgcggtcgctggcggcgccgttgtacagcaacgcatcgacactctgcaggcgctccaccggttcgcgcaacggccccgccggcaggcagcgacggttgcccaggccacgggcggcgtcgatcagcaccagttcaaggtcacgggccaggcggtaatgctgcaggccgtcatcggagaggatcaggtccagggtttcactggccagcagcgcctggaccgcacggctgcgatcggggtcgatcatcagcggtacgccgcagcgctgcacgatcaacaaaggctcgtcacccgccacctcggcgctgtggctggcctcgacacgccacggcaactgcggtggcttggcgccataaccgcgactgaccacgccgacgcgcaagccgctgcgttgacaatgttcgataagccacaggatcaacggcgtcttgccggtaccacccacggtgatattaccgaccaccaccaccggcaccggcgattgatagatctcgccctcacccgccaggaagcgtgcgcgcttgcgctgcaccacccggcgatacaaagactccagcggccgcaacaacgcgagtgccggatggccctcataccaggccttgagcaaacgatcggacatggccatcagggttggctcgccgcctcgacggtgctcatgcgcaagtggctgaaaccgagcttgccggccgcgtccatcgcagtgatcacggcctggtgctgggtcttgccatcagcgctgatggacagcggcaactgcgtgtcgccgccggactctttctgcaaggcctccatcaggctggcgaggtcgtttttctccagcaactggttgttcaccgaaaacaccccgtcggcgctgatggcgatgtccagttgcttgacttgctggtcttcggccggcgaaccgctcacggcttccggcaggtcgacgcgcagttcggtttgccgggtgaaggtggtggtgacgacaaaaaacagcagcaggataaacaccacgtcgatcagcgacgcgaggttgatatcgacattttcccgttgcttgcggcgaaatttcacgctttgcccccaaccaggtccacatcgcggtcgccctgcaccacttccaccaacttgatggcttcctgctccatgcccaccaccagctcatcgatgcgacgttgcaggaaccggtggaagaacaccgaaggaatacccaccatcaggccggcggccgtagtgatcagtgccttggagataccaccggccagcacggccgcattggtggtcatgccggagcccatgaacgaactgaaaatgtcgatcatgcccaacaccgtgccgagcaagccgagcaatggcgccatggcggcgatggtgccgagggcgttgatgtagcgctccagttcatggatgacgcgggcggcggcctcttcgatgcactccttcatgatctcgcgaccatgcttggagttggccaggcctgcggcaaggatctcacccaacggggagttggcgcgcagttccttgagtttttccttgtccagttgcttgttcttgatccagccccagacctgccccagcagatgctcgggggtcacgcggctggcgcgcagggtccacaggcgttcggcgacgatgccgagtgcggcgatagagctcatgatgatcggcaacatcatccagccgccggatttgaccaattcccacacagtgaatgtcccctcgaaaaagtgcgccactttaccatataggtgcgtcagccacagaccccatcggccgaggccttgaccccctagggtaagcgctcgcgccagaacctgcgttgactgcgcgcaacgaccggtggcgcgaatgctcccagttgcacacgcacggccccctgctctgcgctgtcatacacctggctgcccaaccgttgataacgctccatcacctgcggatgcgggtggccgaacgcattgccgcgcccccgcgagatcagcacattgcgcggagagagccgctcgacaaacgcccaggacgaagagctgcgactgccatggtggggcgcctgcagccacgcggtgggcaccgccagggacgaagcgagcatggcctgttcggcgtcgcggtcgatgtcgccggtcagtaacaggcgctcgccattggcctgcacctgcaagacgcaggactttgcattgccactgatggcgccaggccactgccacagttcgaacgttaccccgtcccaggtccatcgttcgccactgacgcagggttgcgtaccgataaacgccggcaacccatcggtttctccgcccaccacacgcttgatcggtatgcccttggcaattgccgccgcaccaccggcatgatccgcgtcggcgtggctgagcagcatgaggtccaatgccccgaccccgagctttcgcaacgacggcagcaccacccgcgcgccgagatcaaaggttccagtgcgcggtccggcgtcgtaaagcaatgcatgatggcgcgtgcgcagaatcagcgactgcccttgcccgacgtccaactgcaccacctccacctgcccgtggggcacctgctctcgcgggggaaacaccgccagtagcaacatcggccagcccagcgtgcgaaagggcacgccgttgggcagcagaagcaacacggcccccaacaggctcaccagccaataccccaaaggtacttgcgccgggatccaggccggcatgtgtccggcgagccacgccagccccttgaacaagccatccagcgcgccgcccgccagccacagaagaccttcgccaatatatggcaatggcagtaatgcagtccccgatagcgccagcggcaacaccaccaggctgatccatggcacagccacgaggttggccagcggtgcgctcaggctgatgggcagtcccagcacccacaacaccggaaacaatccaatggcaatcagccactgaggtcgggtccatgcctgccacaggctccacggccccaaccgcccaccaaacgccagaatcagcactgccaccgccgcaaacgacagccagaaccctggctgcaaactggccaacggttccagcaccaacacaccattgagtgccagcaacaacggccaccataggcccagatgccggaagcgcagccgccacaccaacaccaacccgaccatcacgcaggcccgctgtactggcacgccaaaccctgcgagccagccgtagcccaacgcagcgctgaacgccaggccacacgcccagggcaaccacggccaggttcgcggccagcaaccgtagcgggccaagccggcgatcagcccatagatcaaacccgccagcaaaccgatgtgctggccggagatgaccagcagatgcacggtgcccgtatcctgcaacacttgccaatcggcagtggccagccctgaaccatcccccagcaccagggcaaccaggccggcttcccgaccttgggcgtccaccgccataaggcgctgacgcacgctgtcgcgccaggcattgcgggccggcgccagacgctcgccgtccttgaccgagcccgtggcgccgatgcgttgggccaacagccaggcttcctgatcaaacccgtggaaattcagcaacccggccggacgtttgagggtaaccgccaggcgccaacgttcaccgctgcgcaccggcggcccgccacgccaggacacgcggatgcgtttgggtaagcgggcatttcgcgaccgactatcggccagttcgaagcgcacaccctcgcccgtctgtcgcggcaacccgatcacccgcccctccagccagcgcgtctggccgtccagtgcaggtatcaggcgatcatccaatgcccactgtgcgctgaggcatgcccaactcagccccagcaggaaaaacgccagtgggtaggtacgaaacggcaacaacatcaacgccagcaccggcgtggcaatcagccattccataggcggcaacaccggcaaaaagcgcagggccagcaaccccagcgcaaacgcgcacatccctgtcttcatgaaccatccttttcaagtgatccactcagtcttagccggatgcccagggcggcctatgatgttttgtcacaaagtctgaattttctgtttatagaatgcgggcatacttgcccctcgaactgacctggaccccttatgccccggcgcttattcaaacggtacatgcccgatcccacgagtatcagggaacataagtcattacagtttctcggcacgttgctgcatgacccgaacctctggcacctgaaccggcactcggtcgcacgcgcaatggccgtgggtttgttcgccgcgtttatcccaatcccgcttcagatgctgttggcggcagtcctggcgatcaccgtgcgcggcaatatgcccatcgctatcagcctggtgtggctgaccaacccgattaccatgccggtggtgtttatctgcacctacatgaccggcgcctggctgatgaacgtgccaccgcgcagcctgcccgacgacctcacctggaaatggatcagcggccaactcagcaccttgtggcagccgttcctgctgggttcagtggtgttggggctggtgctgggcgccctcgcctattgcctgaccatgggctactggcgctggtgggtggcccaccagtggaaaaagcgcaaacagcgccgcgcttagcaggcccgcaagcgcaggtgcacgcgcaggccttgcccggtattttccgcccacaggctgccgtcctggcgctgcacggcgttgcgggcgatgctcaggcccagcccgaagccgccatcgccggggcgtgaaccgtcaaggcgggtaaaaggcgcgaagatccgctccaggtccccgtcatcgatcccgccgccctggtcctccagccagacatgccaataatcaccttcgcgacgcccgtccaggctgaccacgccgcccgacggtgagtggcggatagcgttgcgcaagatgttttccagggcctgcgccaacgcattcaggttgcctcgcacccagcattccgcccccaacaggcatggcagccgcgaccccggccagtcgctctcatagcaggcgttttcacgcaacatgtcccacagcgcctgaagctggatagcttcctggggcagcggcgcgcgttcggtgtcgagccaggccagttgcaggctgtcttccaccaggcgctgcatcgcgtcgatttcacggccgagccgctcgcgcagttgcgccaggtcttgctcactgtcacaggccactcgcaggcgactcagcggggtgcgcagttcatgggacatgtcccgcagcaactgttgctgcaacaccacggtgccctgcaaacgctcggacatatggtcgaacgcacgccccagttcgcccagctcatcctggcgactggtggcgtcgtgggacaaacgcgtgttcaactgatcggcacgccaggcattggcctgctcacgcagttgattgaggggcatgatcagcagccgatacaacccaatacacagcaaaagggtaaacaggccgggaatcaccccgttggtcaccacccgccagaacagttgatagcgccccggcatgaagcgttgcggcaactcgatcaccagcgaccccgcatgggggtcgcccggaaacgggatcttcagccacggcaggcctttgacatgccggctcaccggccaatccaggccacgcagaaaggtcaggcgctggctttcgttgtcgctcagcgggatgctgctcaacgattgcaggtcattgccgatcacacctatccaggtgctttcgcgcttgcccatcgcctgcagccaggcgtcgacgccggcattgccgccgcgattccacgcctgttcagcaccgaccgcgtacccactcaaggtgattcgcgccgcatcggacaggtaggcgttcttctgctccatgtagcggccccaggaccagctgagccagatcatcaacaagcaaaaggcgatcagcaggcaggcgagtttccagaataacgagtgcctgcccggcagccttttcaacgggcgttcaaaggccgtcatcgtgaccgctcagcacatagcccttgccccacacggtgcgcacttcgcgctcggtgtagccgatggccttgagcttgcggcggatctggctgatatgcatgtcgaggctgcggtcatggggcgcataaccgcgttgcagcacatgctggtacaagaaaggtttgctgaggacttcttcactgttgcggtgcagggtttccagcagccggtattcgctgcgggtcaggccggcccaatggtccaggtggaaaacatcgcacagctcatcgtcaaagcgcagcgcgcgggcatcgtcgcacaccggtgccggaatcggcaacggacgccggtcgagggccactcgacgcaggatagcttcgatgcgcacgcgcagctcgatcatgctgaacggcttgggcaggtagtcatcggctcccaggcgaaaaccgctgacgcgatcggcttcagcacccagtgcggacatcaggatcaccgggatcgaatggctctggcgcagatgagtgaggatcgacaggccatccatgcccggcaacaggatgtccatcaacaccacgtcaaaggcctgctcgcgcgccatctgcaggccctgctggccattctggcaccaggtcacgtggaaaccacagcggcccaggtgctcatggacataagcgcccagcacggggtcatcttcaatggtcaggatactgggtaggccaattgctgcgggattcattagtatctgcaagtcattctcaatggctgattattcaagattaccccgccacaggcaatcgccaccgggcgccgaatggcgcgaagattgccgtatgtcattaatttgcaagattccacgctgcgcaaatggctacactgcgcaggtggcgcgggccggatgcccgtgtgaatcatcgatatcaatgtggtagcaggagagtggcgtgctgacaagaatggggataaaaggccgcgtactgttgctgaccttattaccgaccagcctgatggcttcgttgctgggcggctatttcacctggatgcagttgtcggaactgcagacccagttgctgcaacgtggcgaaatgatcgccgagcagttggcgccactggtggcgcccgccttgagtgcacgcaacaccgacctgctggagcgcatcgccacccagtccctggagcagccggacgtgcgcactgtgtcgttcctcagcccggaccgtgcgaccctcgcccacgccggcccgaccatgctcaaccaggcccccatcggcaacagctcacacctgttgcaacgcaccggcaatgacgccacgcgctacctgctgccggtgtttggccgccatcgcaacctcgccggcgacctgatcccggatgaagccgaccgcctgctgggctgggtcgaggtggaactgtcccacaatggcatgttgctgcgtggctaccgcagcctgttcgccagcctgctgctgatcgccatcggcctgatctgcaccgcggcactggccctgcgcatcagccgcaccatcaacgcgccaatcggccagatcaagcaagccgtggcccagctcaaggacggcaacctggaaacccgcctgccgcccctgggcagccaggaactggaccagctcgcctctggcatcaaccgcatggccgagaccctgcagaacgcccaggaagaactgcaacacagcatcgaccaggccaccgaagacgtacgccagaacctggaaaccatcgagatccagaacatcgagctggacctggcacgcaaggaggccctggaggccagccgcatcaagtcggagttcctggccaacatgagccatgagatccgcacgccgctcaacggcatcctcggctttacccatttattgcaaaagagcgagctgaccccgcgtcaactcgactacctgggcaccatcgaaaaatccgccgacaacctgctgggcattatcaacgagatcctcgacttctcgaaaatcgaagccggcaaactggtcctcgacagcatcccgttcaacctgcgggacttgctgcaagacaccctgaccatcctcgcccccgccgcccatgccaagcagctcgaattggtcagcctggtctaccgtgacacgccgctggcgctggtgggcgacccgttgcgcctcaagcaaattctcaccaacctgatcagcaacgcgatcaagttcacccgcgaaggcaccatcgtggcccgggcgatgatcgaggacgagcaggaagacagcgtgcaattgcgcatcagcgtgcaggacaccggtatcggcctgtccagccaggacgtacgcgccctgttccaggccttcagccaggctgacaattcactgtcgcgccaacccggcggtacgggcttgggcctggtgatctccaagcgcctgatcgaacagatgggcggcgaaatcggcgtcgacagcacacccggcgaaggctctgagttctggatcagcctgaacctgcccaagacccgcgacgacgtggaggacctgccgtccgcgcctctgctgggccatcgtgtcgccttgctggaaaaccacgaactggcacgccaggcgctgcaacaccaactggaagactgcggcctggaagtcacgccgttcaccagcctggaaagcctgaccaacggcatcaccagtgcccaccagaccgagcaggccattgaccttgcggtgctcggcgtcacggccaacgatatcccgcccgagcgcctcaaccaacacctgtgggacctcgaacacctgggctgcaaagtgctggtgctgtgccccaccaccgaacagatgctgttcaaccagtcggtgcccaaccccaacagtcaattgcaggccaagccggcgtgcacgcgcaaactgcgccgtgccttgtccgacctgatcagcccacgcccgacacgcagcgaacccggcgaaccgttgtccagccgggcgccacgcgtcctgtgcgtggatgacaatccggcgaacctgttgctggtccagaccctgctggaagacatgggcgcccgggtgcatgccgtggaaagcggttatgcagccgtcgacgcagtgaagcaggacaccttcgaccttgtgctgatggatgtgcaaatgcccggcatggatggccgccaaagcaccgaggcgatccgccagtgggaaagcgaacgcagcggcacgccattgccggtagtcgccctcaccgcccacgccatggccaatgaaaaacgcgccttgctgcaaagcggcatggacgactacctgaccaagcccatcagcgaacgccaactggcccaggtggtgctgaaatggaccggcctggccctgcgcaatcagggtccggagcgcacgaccgacaacctcggccctggcgtgaaactgccggtgctcgaccacgaggaagggctgcgcctggcggccggcaaagcggacctggcggcggatatgctcgcgatgttgctggcttccctggaggccgaccgcctggccatcacccaggcccgtgaggccaatgacaacaacgccctgatcgaacgcgtgcatcgcctgcacggcgcaacgcgttactgcggcgtaccgcaactgcgggcatgctgccagcgcgccgaaaccctgctcaagcaggacgacgccaaggccatgcatgcgctggacgaactggacatggcgattgcccggctggccagtgaggcgcgggtcagcgcctgaagctactttgacgccgatcaattgtgggagggggcttgcccccgatagcgtcgcatcagtcgaagcatctgtagctgacacaccctaatcgggggcaagccccctcccacagttgtccagcatttccaacagattaattgcggggagccttttgatgcgcgtgattcttttcagcagccaaacctacgaccgcgacagctttctcggcgaaccattgccgcctggcctggagctgcaattccaacccgcacggctcaacctcgacaccgtggctttggccgaacatcacgaagtggtctgcgcctttatcaacgatgacctcagcgccccggtgctggaacagttggccaagggcggcacacggttgatcgccctgcgctcggcgggctacaaccatgtggacctgcccgtcgccaagcgcctgggcctgaccatcgtgcgcgtgccggcctattcgccccatgcggtggccgaacacgcggtcgcgctgattctcgccctcaaccgtcgcctgcaccgcgcctacaaccgcacccgcgacggcgatttcagcctgcatggcctcaccggtttcgacctggtcggcaagaccgtcggcgtggtcggcaccgggcagatcggcgccaccttcgccaaaatcatggccggcttcggttgccagttgctcgcctacgaccccttccccaacccgcaggtacaggccttgggtgcacgctacgtgagcctgcccgaactgttggcccaggcgcagatcatcagcctgcactgcccgttgacggccgacagcaaacacctggtcaacgcccgttccctggcgcagatgcaaaccggtgcgatgctgatcaacaccggtcgcggtggcctggtcgacaccccagcgctgatcgaggcgctcaaggacggccagctcggctaccttgggctggatgtgtatgaggaagaagcgcagttgtttttcgaggaccgctccgacctgcccttgcaggacgacgtacttgcacgcctgctgaccttccccaacgtgatcattaccgcgcaccaggcgtttctcacccgcgaggccctggccgccatcgccggcaccacgttggccaacattgccgcgtgggccgatggccgggcacagaacctcgtcgaaggatgatcagcggtcacataccaggctcatgatgagccagcacccgtgataggatgccgcgcctatttggaggatccatggccgaacacgatttccgcttcagtttgctgagcccgcaacacaccctgatcgaatgccgcgccctggtgccgggccgttaccaggtcaccggcaacggtggttcgatcaagcatggcgacgtgctgatcgtctccctgcgcggcagtaaaaccctgtcgatgcgcctcactgtcgaaggtgacgcgcgctactccatccgcccggcaggccaatgggtcgccatggcccaggggccgaagttcggcgagttggagattcacacctggaaggtcaactgcgacagctgcgacgccgtgttggacttcgagtttgcagtggaaaccaagctgagcaaagagccactgcaacccgccgccaatgcgcggatcgccgagttgggctgggccagcgagggcgacaagcaccgctgcccgaaatgccagaaggctgcgcaatgagaggcctgttgctgcttgccgccctcggggcgggcctgaccggctgcgccggcgacgcggtcaagctccagcaggatcacagctacgtagtggaatggattggtgagcggccgctgatggactacgcgcacctgaccgtcaccctcggcgccgatggccgcgcctacggcaatggcggctgcaaccattggttcgcgccttacaccgtcgagggcaaaaagctcagcttcggccagatcggcagcacccgcaagctctgcgccgaagccttgatggagcaggaacaccgcttcttccaggccctgcaaggcgtacagcgctgggatatctcgccgatcgagcagacgcgcttctggccggccgagggcaagccgatccgcctgtggctcgaagaaggctgataccgccgatcggtaggttggtgggatccatatgtgggagggggcttgcccccgatggcggtgtaacagtcaactgatggagtgactgacacacagctatcgggggcaagccccctcccacatttgattccgggtagcccctagccgcgcaaggccttgagcttggccagcacgccttgcgccgtctgctcgcccatcaacgtttcgcgcaccttgcccttgtcatcgatgatgtaggtcaccggtagcgcttcactgcgtggaatatcgaaaatctcttccgggttctgcgccagcaccgtgaacttgatgcccagcttgtcgctggcggctttcagctcttcgccctgcacattgtcgaagttgaccccgaacacacccacattctgcgccttcagctgtgcggccagtgcgttgagctcagggatttccgtgcggcacgggccacaccattcggcccagtaattgaccaccagccactgcttgtccaagcgttcggacgctaccttctggccatattggtcaacgccgtaatcgttaccgcagccgctgagcagcagggttgtgatgatcgccaatgcaccgatcagtcgcctagtcatggggtaatccttcgcaaaaatgaacgttggctgcggcctatcgcctcttacggtttaaggacaggtcgctgcgcgggtagaatacccgccaccttacgcaagatgcgacccgcacatgaccgatctgacgctttatcacaacccgcgctgctcgaaatcccgcggtgcgctgcaactgctggaagcccgtggcctcacccccaccgtcgtacactacctggaaaccccgctggatgccgcgcaactcaaggcgctgctcggcaaactgggtatcagcgcgcgccaactgctgcgcagcggtgaagatgaatacaaggcgctcaacctggctgacgccagcctcagcgaagcccagttgatcgccgccattgccgatcacccgaagctgatggaacgcccgatcctggaaaccgccgacaaagccatcatcggccgtccgccggaaaacgtactggagatcctgccgtgacgccgccgtatgtgctggtgctgtattacagccgcaacggctcggtgagcgaaatggcccggcagattgcccgaggcatcgagcaaggcgggatggaggcgcgcttgcgcaccgtgccggcgatctccaccgagtgcgaagcggtggcaccgagcattccggatgaaggcgcgttgtatgccagcctcgacgacctgaaacactgctccggcctggccctgggcagcccgacccgcttcggcaatatggcggcgccgctcaagtacttcatcgacggcaccagcaacctgtggctcaccggcgccctcgtcggcaagcccgcgggtgtgtttacctccaccgccagcctgcacggcggccaggaaaccacgctgatgtcgatgctgctgccgttgctgcaccacggcatgctgatcaccggcctgccctacagcgaacaggccttgctcgatacccagggcggcggcacgccgtatggcgccagccaccacgccgggcctgacggcaagcgcatgctcgaccagcacgagatcgccctgtgtcgcgccttgggcctgcgcctggcgaacaccgccaccttgctggagggcggtcgtggccaggaagcctaaggtcctgccgccccaggcgtggttggagccacgggtcaaggtggctcgcgcactcagcctgctggcgttttttggcctggtcggtttgctctgcgtgtattacctgttcgtcgccgacctgcacggcgcacggccgtgggtgatcctgctgatcgaactggtgccgctgctggtgctgacgcccggcatgctgctgggcagcgcgcgcggccattcgtggatgtgctttgtggtgaacctgtatttcatcaagggcgcgctggcggcgtatgacccgaaccggcagtggttcggggtgctggaaatgctggcgagcctggcggtgttttgtacggcgttgttgtatgtgcgctggcggcatcagttgaaccgacagctggcagcggcctgaagtccctcatcgggggcaagccccctcccacactgttaccgcgccgcctatccaatgtgggagggggcttgcccccgatggcaccaccccggcctcaatggttgacggtgtacgccaacatcatcgacaactggcacatcggccgcccgctctcggcgtgccactgattgaacgcaccctgcaccgtcgccaggtcgcgcaggctggtcggcgccttatcgacgatcttctgcgcgttcaacgccgccaccacgtcatcactcggcacaaaggtgtccttgccgaccatgcgcaaaaagcgcggcgcggacagcccgccaagctggtggccgtgcttgctcaggtacttccacagcccgacgatgtcggtcaccggccaatcggcgatgaacgcgccaaagctgcccttctcctgctggatatcgaggatcatctgcgcgttgcgcggcacgctcttgagcttgcccaggtggcggatgatgctggtgtcctgcatcagccgctccaggtgctcggcccccatcagcactaccttttccggatcgaagccgaaaaacaccttttcgaacgccggccacttggcgtccaccacactgtgcttcaagcccgcacgaaacacgcgcagcgccagggtcgacaggtagcgatcatcactgatcttgcgcaattgcgctggggtcttgggtgcaggcagatgggcttccagctcggccgcagaaccgaagcgattcagacaatattcgtgcagccacttgtaatcgcgcatgccctctcctggcaattgaattgaaaacggcgcccgcgagcgccgtgtgtcagagccttgaagggactcagaggttcacaacattgacgaagcgcgacgcggcggtttcatcaattttcaggctggtgaagtcaaacaggttgcggtcggccaattgcgaagggatcacgttctgcaggctgcggaagatgctttcggtacggcccggggtcttgcgttcccagtccagcagcatttccttgaccacctggcgttgcagattctcctgggaaccacacaggttgcacgggatgatcgggaattgcttgaagtcggagtaggcctggatgtctttctcgttgcaatacgccagcgggcggatcaccacgttgcgcccgtcatcggcacgcagcttgggcggcatggccttgagcgagccgttgaagaacatattgaggaagaaggtctcgacgatgtcgtcgcgatggtgacccagggccattttggtcgcgccgatttcatcggcgaaggtgtatagcgtgccacggcgcaggcgtgagcacagcgagcaggtggtcttgccttccggaatcagttccttgaccaccgaataggtgtctttctcaacaatgtggtactcgatgcccagctccttgaggtaggccggcagcacgtgctcgggaaaacccggttgtttctggtccatgttgacggcaacgatctcgaacttgatcggcgcgaccttttgcaggtgcagcagcacgtcgagcatggtgtagctgtctttgccgccggagaggcagaccatgaccttgtcgccgtcctcgatcatattgaaatcggcgaccgcttcaccagccaggcgacgcaggcgtttttgcagtttgttctggttgaccgtaagagtgcccatggcgcttggatccgctagaggtgtgtgacgaaaagccgagtattttaccggtaagaatcaccgagttccattgcgggagggggcttgcccccgattgcggcgtctcagcgactcattgatagctgacacaacgccatcgggggcaagccccctcccactatgatcagcgtccagtcaaaagacctcagcgcgattaaccccaacgtttacagcgcaatttgctctaaaggccctacagttattcaggctatcccttcctatactgcgactagaggtcgcacagctatccaggacctttgaggccatttggcccgtgggcgctccgatggggggcgatggcaataacgacaggagtgactggcatgatccatcatgtcgtggggctttttacccatcccgaccaggaatggcgggaaatccgtggcgataaagaagaaagcatcggccacatgtacctcacccataccttgattcttgcggcgattcccgccgtatccgcgtttatcggcaccacccaggtcggctgggtcatcggcaaccgcgcgccggtgatgctgacccaggaaagcgcattgtggatgaccctgatgtcctacgccgcgatgctcggtggcgtggcggtgatgggcgcgttcattcactggatggcgcgcacctacgacgccaatcccagcatggcgcgctgtgtggcgtttgccacctacaccgccacaccgctgttcattggcgggctggcggcgctctatccacacatgtggctgggcatggtggtgggcacggcggccatctgttacacggtgtacctgctatacgttggcgtgccgacctttatgaacatcgatccggatgaaggcttcctgttttccagttccatactggcggtaggattggtggtactggtagcgatcatggcctttaccgtgatcgtctggggcctgggcgtaggtcccatctacaccaactgagcggaaaaaaacccaggcaaagccaccgcaaggtggctttgtgcatcatgcatgaccattcggcgcctgacagattcggaaacacccagctttgcggcatactggacatctctggagatatgtacagcatgcccgagcaactcaatacccgcgtcgaagattgtttcctgctagccgaatcctttttcaaacgaagcttcaaacgccctcaggtcagcctcaagctgcggggccagaaggccggtgtcgcgcatttgcacgagaacctgctgcgcttcaacccacagctgtaccgtgaaaacagccaacatttcctgaagcagaccgtcgcccatgaagtggcgcacctgattgcccaccaattgtttggcgaacgcatccagccccacggcgaggaatggcaattgatcatgcgcggggtctacgaactgccgccggaccgttgccacacctatgccgtgaagcgccgccaggtcactcgctatatctacaagtgcccgtgcgcagacagtgactttccgttttcgtcacagcgccatgggatggtcgcccagggtcgaaggtatttgtgtcggcggtgccggcagaccttggtgtttaccggcgaaacccgggtggagtgagggcctcatcgggggcaagccccctcccacatagtgaccgcgccgccgacccagtgtgggagggagcttgctcccgatggcgccggtccagtcacccgactaccttggcccgccgcaaagcctctatccgctgaacactgaaccccaactccgccagcacctcatcactgtgcgcccccacggcggcgccaatatgcctgggctcaggcagcccctcggagaactttagcgggcacgccaattgcgcctgggtcgaaccatcgccccgtggcacctggctgaccagttgccgcgctttaagctgcggatgctccaccgcttcactcaggctcaacaccggctccacacacgcatccaccccggcaaacaactcacacaactcatcaaagctgcgtttctcgaattcaacctgcagtgcctgcttgagtgcgggcgacaagcccagcgccgccaactccggccgtcccagcgcgccacagagctgctgcataaacccaggctccaggctgcccactgacatccaacgcccgtcccgcgagcggtaataatcgtaaaagctgccaccgttcagcacatggctttcgcattcaggctcgacgtcgcacgccaggtagcccgcgccggccatggcgttcaggctgaacgagcagtcggtcatgctcacatccagagactggccgaccccgctctgctgccgggcgatgactgccgcgagcagccccaccaccgcatgcagcgagcccccgcccacgtccgccaactgcacgcccagtggcaacggtccactgtcctggcgcccggtgtagctggcgattccggccagcgccaggtaattgatgtcatgcccggcgcggtccttatacgggccggtctgaccgtaaccggtgatcgacacataaatgagccggggattgatcgccttcaacgcctcatagcccaagcccaggcgctccatcaccccaggccggaactgttcgaggacgatgtcgtagtccttgaccagcgtccgcacgatctccagcgcctcggcctgcttgaggtccagcgccaggctgcgcttattgcggttgaggtaggcgtggctggccgacgtgccctggtcgtggggcggcagtacgcgcaacaggtccatgcgcgtgggcgattcgatgcgcagcacctcggcgcccatgtccgccagcatcagcgacgcgaacgggccaggcagcaaggtggaaaaatccagcactttgagggacgccaagggacctgacatgggcactccatttcggttttgaatgcccacagactaggcagccttgcgccagtcggcaatcgccggaacagtcaccaacagtgaccgttttgatcacggcgggctttttcgtggcggcggctttatcattggcccacgtttgcttgcagagtgttccatgaagtttgcgattgcagtgttttgtgccgcccatgcgccctcctcgcgccgcgccctgctgttcgcccaggcggcgctggccggcgggcatgagattgtgcggctgtttttctatcaggacggcgtgtacagcgcgtccaattcggtggttgcgccccaggatgagcaggacatcgcccgtcaatggcgggagtttgtcagcgcgcatcaactcgacagcgtggtgtgcatcgctgccgccttgcgccgtggcgtgctcaaccaggaagaagccacgcgttatcaacgcagtgcggtcaacctcgatgcgccgtgggagctgtcgggcttggggcaattgcatgacgccgcgcaggccgccgaccgcctgatctgttttggagggccgtgacatgtccaaatccttgctggtcatcagccgccaggcgccgtggtccggccccagcgcgcgcgaagcgctggacatcgtgctggccgggggcgcgttcgatctgcccattggcctgctgttcctcgatgacggcgtattccagctggcgccgcatcaagacgccaaggccgtgcagcaaaaggacctcagcgccaatctgcacgcgctgggcctgttcggtatcgacgaggtattcgcctgtagccatagcctggccgagcgcggcctcacgacgcccgccagcgcacagccgctggacagtgctgcgatctcccagttgattgaccgttacgaccaggtgataaccctctgatgtcgactctacatgtggtttcccactccccgtttaccgatagccgcctggacagctgcctgcgtatctgtggcgtaaatgacgccatcctgctctgcggcgacggcgcctacgggttgcacaacgcggcgctgcacaccaaaggcgtgaaggtgtttgtactggccgaagacatgcaggcgcgcaacctgccactgcccgactgggccgacagcgtggactacccaggcttcgtgcagttgtcgctcgactacgacaaggtcaacagctggctatgaacaccctgaccgtaggcactcgcagcctggaactggacaaggacggctaccttgtcgacctgaacgcgtggtccgaagaagtcgccaacgccctggccgccgccgaaccgctggcgttgaccgcggaccattgggaaatcctcacactgctgcgccagttctatgccgaattccagctgtcacccgccacgcgcccgctgatcaagtacaccgccttgaagctgggcccggaaaagggcaacagcctgcacctcaacaaactgttcaacggcactcccgccaaactcgccgccaagctggcgggcctgcccaggccgacgaattgcttatgaccgactttgccccgctgacccttgaaacccctgccgaacacccgtttgcgcaattcgtgcgcatcctgggcaaaggcaagcgcggtgcgcgcaacctcacccgtgaggaggcgcgcgaagccatgggcatgctgctcgacgaaaaagtcgaggacacccagctcggcgccttcctcatgctgctgcgccacaaggaagaaagcccggaagaactggccggtttcaccgaagccgtacgcgaacgcctgaacgctccggcgctgaatgtggacgtcgactggccgacctacgccggcaagaaacgccacctgccgtggtacctgctggcagccaagtgcctggcgcaaaacggcgtgcgcatcctgatgcacggcggcggcgcccacacggcgggacggctgtacaccgagcaattgctggagggtttgcagatcccgctgtgccgcaactggcagcaggtcgaagccgcctacgcacgcggcagcctggcctttatcccgctgggtgactgggcgccgcagttgcaacgcatgatcgacctgcgcaacaccctgggcctgcgctcgccgatccactccctggcgcgcttgctcaaccccttgaatgcgcgccttggcctgcaaagtattttccatccgggttaccagggcgtgcaccgcgatgccagcggcctgctcggcgacaatgtaatcgtggtgaagggcgacggcggcgagatcgagatcaatcccgactcggccagtcacctgtacggcaccactggaggcgaaagctgggacgaagagtggcccgccctctccgcccagcgccacgtcaaaccggccacactcgaacctgagcatctgaaagcgctgtggcgcggtgatgtcgaggacagctacccacaactggccctgatcgcgaccatggccctagccttgcgtggcctgggtcattcacgggaacaagcgttcgccctggcccagcaatactgggacgcgcgggacaaatcgatttaatcgatgattaacccccggtctttgcgcttttagttcgaactcatccctttagactgggctccaacgcttattagcctaggagccagtcatgggtttgctgatcgaaggacgctggaaagaccagtggtacgaaagtagcgcggacggcgcgttccagcgcgaacaggcgcaacgccgccactgggtcaccgccgatggcgcgcccggcccgagtggcgaaggcggcttcaaagccgaggccggtcgctaccacctctatgtctccctggcctgcccgtgggcccatcgcacgctgatcctgcgcaagctcaagggcctggaaagcctgatcgacgtgtcggtggtcagctggctgatgctggaaaacggctggacctttgacaaggcccacggttccaccggcgacaagctgggtgatttcgacttcatgcaccagcgctataccgccgacaccgccgattacaccggacgcgtcaccgttccggtgctgtgggacaaaaagctcaagcgcatcgtcagcaatgaatcggcggagatcatccgcatgttcaacgacgccttcaatgaattgaccggcaacaccctggacttctacccccagccgctgcgcacgaccattgacgcgttgaacgaacgcatttacccggcagtgaacaacggcgtataccgcgcaggcttcgccacctcacagcaagcgtatgaaagtgcgtttgatgatgtgttcgccgagctggatcatctggaacagcacttgggcgaccatcgttacctggccggtgaatacctgaccgaggcagatgtgcggctgttcaccacgctgattcgttttgatgcggtgtactacagccacttcaaatgcaatttgcgcaggattgcggattatccgaatttgtcgaattggttgagggagctgtatcagtggccgggagtggcggagacggtggattttgcgcacatcaaggggcattactatgccagccatcgcacgatcaatccgacagggattgtgccgaaggggccgttgcaggggtttgatgaacagcacgatcggaagcaattgattggcaaaggcgtgtggaactgatccgacgtattggctggcttttagggcctcatcgggggcaagccccctcccacactggaatgcagtccaatgtgggagggggcttgcccccgatgctttcaaggctcagacctgggactgcgcgccctcaaaccacttcagcttctcgcgcaacaccaccacctcacccacgatcaccagtgtcggcgcatgcacttcatgctccgccaccatgcgtggcaaatcggcgagggtgccggtgaacacgcgctgattggacgtggtgccctgctggatcaacgctgcgggggtgtccgatgcacgcccgtgcttgatcagctgttcgcagatgatcggcaagccgatcaagcccatgtagaacaccagagtctgcgaaggtcccaccaggtcatgccagggcaggtccgaggtcccgtccttcaaatgcccggtgataaaacgcaccgactgcgcatagtcgcgatgggtcagcggaatcccggcatatgccgcgcaaccgctggccgcggtgatccccggcaccacctggaacgggatgccatgggcggccagttcctcgatctcttcgccaccacgaccaaagatgaacggatcgccacccttgaggcgcagcacgcgcttgccctgcttggccaggtccaccaattgctggttgatctggtcttgcggtacggcatgatcagcgcgacgtttgccgacatagatgcgctcggcatcacggcggcacagttcgagaatcgccggtgcaaccaggcggtcatacagcacaacgtcggcttgctgcatcaggcgcagggcacggaaggtcagcaggtcgggatcacccggacccgcgcccaccaaataaacctcgcccggcgcataaggcggcgcgccgttgaccttttcgatcagcaggcgctcggcctcatcaccctgcccggccaactggcggtcagcaatcgggccctggaacacttcttcccagaacgcacgacgctgctgcacatccgggtacaagcctttgacctgggcacgaaaacgcgccgccagcccggccagttgaccgtaggtggacggaatccaggtttccagcttggcgcggatcaagcgcgccagcaccggcgcatcgccgccgctggacactgcgatcaccaacggtgaacggtcgacaatcgccgggaagatcacgctgcacaaggctggcgcatcgaccacgttgaccggcacgcaacgacgcttggcatcgctggacacttgcgcgttcagcggctcgtcgtcggttgccgcgatgatcagggtgcaagcatcgaggtcggcctcctgatagccgcgcagaatcagttccccgccactgcccagtaccagttcacgcaactggtcttcgatctggggagcaaccacccgcagcaccgccccggcgtcggccagcagccgggatttgcgcaaggcaatctccccgccaccgacgaccagcacacgactgccgcgcaggttatgaaacagcggcagaaattccatttagcgaatgacctcaacgcccgccatgtacggcttgagcacttccggcacacggatcgagccgtcagcctgctggtagttttccagcacggccaccagggtacggccaaccgccaggccggaaccgttgagggtgtgcaccagctccggcttgccggtttccgggttgcggaaacgcgcctgcatgcgacgggcctggaaatcaccgcagttggagcacgacgaaatctcgcggtacttgtcctggctcggcacccagacttcgaggtcgtaggtcttcacggcgctgaagcccatgtcgccagtgcacagcgccagtacgcggtacggcagctccagcagttgcaggacacgctcggcgttggcggtcaggccttccagtgcgtccatggaggtcgatggctcgacgatctgcaccatctcgaccttgtcgaactggtgctggcggatcatgccgcgggtgtcgcggccggaggcgccggcttcgctgcggaagcacgggctgtgggcgacgaacttgatcggcagttgcttggcgtcgaggatctcgccggagacgatgttggtcagcgacacttcggcggtcgggatcaggtacaggtcggcttcgccgtcgcggctgatcttgaacaggtcttcttcgaacttcggcaactggctggtgcccatcagcgccggcgcctgcaccaggtacggggtgtaggcctcttcgtaaccgtgctcgccggtgtgcaggttgatcatgaactgcgccagggcacggtgcaggcgtgcaaccgggccacgcagcagcgagaagcgcgcgccggacatcttggcggcggtttcgaaatccaggccaccgctcagttcgcccagggcgacgtggtccttgatctcgaaatcaaaggctttcggcgtaccccagcgacgcacttcgacgttgccgtcttcgtctgcgccgatcggcacggattcgtgcggaatgttagggatgcccagcaggatcgaatccagctcggactggatcttttccagctcgaccttaccctcggacagctcggtgcccatgcgctcgacatccgccatcaacggcgcgatgtcttcgccgcgctgcttggcctgaccaatggatttggaacgcgcattacgctcagcctgcagtgcttcggtgcgggtctggacggtcttgcgctgttcttccagcgcttcgatgcgcgcaacatccaaggcaaagccacgggatgccaggcggtccgctacgtcctgaaggttgctacgtaacagtttggaatcgagcatgtcggtctctcgtttatcaaagtttggtcaaggacaggccggcccaggtggcgagcagcccgccgaatacgctgatggccgcatagccaattgccagcggcacttgcccgctttccagcaggcgcacggtatccagtgaaaaggatgaaaaagtcgtcaggccgccaagaaagccaaccatcaggccggcacgtacctcgataggcacttccgggcgcagcaaaaacaggccgtataacacgccgatcaacaggcagcccacgatattaacggcgagcgtcgccgtatagaagtgtttcggccaattggcgttgatccaattgcccgtggcaaagcgcagcagtgtacctgcgataccacccgccgaaacggcgacaaccagaggaatcatgactttctccgctgccgggggctcaggcggtcgagggtggcaaggtgattaagcttttcaccaatcttcagctccaggccacgaggcaccggctgatacaacggcaacggctcaagctcatcgggaaaatagtcttcaccggccgcataggcatccggttcatcatgggcgtaacggtattcatcgccataacccagctgcttcatcagcttggtcggcgcattgcgcaagtgcatcggcacttcgagcgagccatattcggcggcggcgcgcagggcggatttgaagcccatgtaaaccgcattgctttttggcgcgcaggccaggtaggtgatggcctgggccaccgccaactcaccttccgggctgcctagtcgttcctgcacgtcccatgccgccaggcacaggctcagggcacgcgggtcggcgttgccgatgtcttcgctggccatgcgcaccacgcggcgggccaggtacagcgggtcgcaaccgccgtcgatcatgcgtgcaaaccagtacagcgcaccatcggggttggagccgcgcacggatttgtgcagcgccgagatctggtcgtagaaggcttcaccgcccttgtcgaagcggcggcgcgtgtcgccgagcaggctttgcaggaggtcgacgccaatctcaccgccgtcttcggccaggtcggaggcgttttccaacaggttgaggaaacgacgaccatcgccatcggcggccgtcagcaggatcttgaagccctcttcgctcacgctcagttggcgcttgcccaagcccttgtcttcgttcaaggcgcgctgcagcagcttctgcatcgccgcctcgtccaggcttttcagcacatagacccgcgcccgcgacagcaaggcgttgttcaattcaaacgaagggttctcagtggtggcaccgataaagatcagcgtgccgtcctccacatagggcaggaacgcatcctgttgcgacttgttgaagcgatgcacttcgtcgacgaacaggatggtgcgcttaccatactgcccggcctgctgcttggcgacttccaccgcctggcggatctccttgaccccggcgagtaccgccgagaccgtttcgaagtgcgcatccgagacttttgctaagagccgcgccagggtggtcttgcccacccccggcggcccccagaaaatcatcgagtgcagcgcgccctgctccagggcttcacgcaggggcttgccgcgagcgagcaggtgttcctgaccgacgtactcatccaggttggtcgaacgcaggcgtgcggccaatggctgggcaatcgggtcacttcgaaacagatccatgggcagcgtttgaaacctctggggaatttattcctggatcacgtcggcacccttggggatgtcgaacttgaacttggacgccggtaccggctggttggccttgaccccggagaacaggatatcggtgcgctggccgacactgtcgatcaggcgcatgttgttgatcacgccgttaccgaacgacaaggacagggtgtcgaacagcgtgtccttggatttcggcttgagggtgaactcgatcacgttgctggtctgcttggaggtaatgtcgaagctgtcattgatcttcgacacgtcacccgagagcaacagcgccggagtctggttcaggcgcgggtcgagcttcttgatggtcgcctgttccaggtccgggtcccacagggtgaccttctggccatcggacacgatggtctgctcagccttgccttcggtgtgccaatagaacaggccaggacgctgcacggccatttcgccagcggtttcctgcaactgggtgcctccggcatccaaggtcaactgggaaaagcgcgcggtcagggtctgggatttgtcgagcaggttcttcaggctggcgacggaggccgggtcagcgtgagccgaaacagcggtcagggccagtgccggcaacaacagcatgcggataaagcgcatgggagtcctcattgagtagtcagggcgcgccgcgtgctgtcacgcggcgcgggatcagtcgcgcatctgcccgggggcaatgacttcgcgcgagccgttggtgttcattgcggtcacgacgccagcgttttccatggcttcgatcatacgagcggcacggttgtagccgattttcagcttgcgttgcaccgcggaaatcgaggctcgacggctttcgagcacgaacgccacggcttcatcgtacagcgcatcggtctcggcatcatcgtcgccaccgccgctgccgccatcgaagccgctgccggcttcttccacaccggcgaggatgtcatcgttgtactccggtgcgccgcgcagtttccaggcttccaccacacgatgcacttcatcgtcggaaacaaaggcgccgtgcacgcggatcggcaggctggtgcccggcggcatgtagagcatgtcgccgtggcctagcagttgttcggcgccgccctggtcgatgatggtccgcgagtcgatcttgctcgacacctggaacgccatgcgcgtcgggatgttggccttgatcaggccggtgatcacgtccaccgacggccgctgggtggcaaggatcaagtgaataccggcggcacgggccttctgggcgatacgcgcgatcagctcttcaaccttcttgccgacaatcatcatcatgtcggcgaattcgtcgaccaccaccacaatggtcggcagcttggtcagctttggcgcttcgtcgtgaatgctttcgcgccggtacaacggatcatcgatggtctcgccgcgctcgtgggcttccttgatcttggcgttgaagcccgacaggttacgcacgcccatcttcgccatcagcttgtagcggcgctccatctcggcaacgctccagcgcagggcgttggcggcgtccttcatgtcggtgaccaccgggcacagcaggtgcggaatgccttcgtagatcgacagttccaacatcttcgggtcgatcatgatcagcttggcgtcttccgggccggacttgaacaggatcgacaggatcatcgcgttcacccccaccgacttaccggaaccggtagtaccggccaccagcaggtgcggcatcttcgccaggtcggtgatcaccggcttgccgccgatgtcatggcccagggccagggtgaccggcgatttgaagttgtcgtactcgggcgtcgacagcacttcggagaagcgcacgatctggcggtcttcgttgggaatctcgatacccacggtggtcttgccgggaatcacttccaccacacgcacactggtcacggccagggaacgggccaggtctttcgccaggttggagatgcgactgaccttcacaccggcggccggctggatttcgtaacgggtgatcaccgggccgggatggatggagtccaccgacacttcgacaccaaactccttgagcttgatttccagcaggtggccgacggccgccagggattccggagaatagttgagttgtttcttttcggccgggtcgaggatcgagatcggcggcaaggtgccttcgacggcgctgtcgacgaacaacggtgcctgtttctctttctgtacgcgatggctcggttcggccggcttgggcggcgcgggggcaatcactggcggcacctgtttctcgcggtccgacatgtgcttgctcagggcctgctcgcgctcgatcaggcgttccttgacctttgcctgctcgcgccggtccggtgtgctcggcgccaccacttcgttgacacgggtgtccacctcacgcagctgggcaaccatgcgcttgcgctcgacacgggccgcccaccagcggttggcggcgccctggaacagctccagcaagtcgagggtgatcttgccggtcacgtccatcaccttgaaccatgacaggtcggtgaacacggtgaggccgaacaggaacagtgcgatgaacatcagggtgctgccctggatattcagggtccggcgcgccaggtcgccgaggctttcacccagcgcaccaccggcgcccgccggcaggccggtgggtgcatggaaatggatatgcgccagggccgcgccggacaacaccaggaacaccaggccgatcaggcgccaggaaaacagccatccgctccactgccacggctcgtggcgctggcggaagatctgccaggtcttgatcgccaacagcaacgggaagatataggcgaagtaacccagcaccatgaacaggatatctgcgctgtaggaaccggcaggcccaccgaagttctgcacgtcttcgatcttgctgttgtggctccagcccggatcgtccttgccataggtcagcaaggccatcatcaggaacaggcacagtgcgccgatggcgatcagcgcaccttccttgaggcgataatgcaggtgctgacgccaggccggcacgactgctgctttaggtgttgcggcggatttcttcaaaacgggtcttttcctgcgccttgagcgcgtccatctgttgaatgactgcaaatactgcccaatccgagcagctgaaaaatgaacgagcgtcgttgaatctactgtttaacaccgggcgattgctggatgaaatgacgataacgccacaatggccgcattgtacgggtttgtctccctgatgccacgccgcttggcgctcttccagcagcatagccaattgtgtgtcacaagatgttcaatttgagcatgcattgtctttgctgacaaaggcttatgagctgtttttaccaatccaggcaagcttggcaaatggcctgcatggaatagacccgattacgaccacgcccccggcatagagttgcagaaacacctgctcacgctaatcccccttaatgcctgattcgggctggcccgatggcgccaggtcgacaataatcagcactgccgccgcaggtgccatacctgccactcccctccccttccgcaaagcctggatgccatgctgacctggttacaacgcgattcaatgatcttccctgccttggccaaagccatgcgcgaacccaatggcctgctcgccgccggcggtgacctcagcgccgagcgactgatccaagcctatcgtcatggctgcttcccgtggttttccgagggccaaccgatcctgtggtggtcgcccgacccacgcaccgtgatattccccgacgaactgcatgtatcgcgcagcctgggcaaactgttgcgccaacagcgctacagcgtgaccttcgaccaggacttcgccgccatcatccaggcctgcgccgcacctcgcgcctatgccgatggcacctggatcaccgaaggcatccagagcgcctacctggaactgcaccagcgcggctacgcgcattcggttgaggtctgggacaagggtgaactggtaggcggcctgtatggcctcgcaatgggccggctgttttttggcgaatccatgttcagccgcgccgacaacgcctcgaaattcggctttgccacgctgacccgtcaattgcaggcctggggttttgtgctgatcgactgccagatgcccaacgaccacctgcacagcctgggtgcccgcgccatatcccgcaacgacttcgcagggttcctgcgcgaccatctggaccagcccaacgccggaccatgggtttcctaggcgacatcggcgctcctggcttacacttatttcaaagcttatccgagggttgatcatgaccgagttggcgcgtttgaagttttatgccactcaaccccactcttgcagctatctgcccgacgagcaggccaccacactgttcctcgaccccagccagcctatggacgtgcatgtgtatgccgacctgtcggagatgggctttcggcgcagtggcgaccatctgtaccggccgcattgccagaactgtaatgcctgcgtgcccgcacgcatccccgttgcgcagtttctgccggaccgcaaccagaaacgcatcctcaagcgcaacgccgacctgacggtgacatctgccaagccgcgcttcaccgaagaatatttcgacctttaccagcgctacatcgagcaacgccacgccgacggcgacatgttcccgcccagccgcgatcagttttccacctttctggtacgcgacctgcccttctcgcgcttctacgaatttcgtgcgaacggccgcctggtggccgtcgcggtgaccgatctgctgcccaatggcctgtcggcggtctacaccttctatgaacccgccgaagaacgccgcagcctcggacgcttcgcgatcctctggcaaattggcgaagccttgcgccaggaactggaggcggtgtacctcggctactggatcaagaactgcaaaaagatgaactacaagacccaatatcggcccatcgaactgctgattaatcaaagatgggtcgtgcttaactagaaccccttggcttaaacaccctttttcgggcacaatgcacgccgcttttgcctggcgcagttgcaccgggccattcactggataccgagggctttactgcatgtcgaaagaagacagcttcgaaatggaaggcactgtcgtcgacaccctgcccaacaccatgtttcgtgtggagttggaaaatgggcacgtcgtaaccgcgcatatctccggcaagatgcgcaagaactacattcgtattcttaccggtgacaaagtgcgcgtcgagctgacgccctatgacttgagcaaagggcgcatcacttaccgcgctcgctaagcaagtcaatacaaaacgcccggttatgccgggcgtttttgtgtgtgcgctatttaccaaacgccaaaaccaaatgtgggagggggcttgctcccgatagtggtagatcagtcactcatgtagcgactgaaacactgctatcgggggcaagccccctcccacattgacgcccaccgctatcgatcaggccatttcagccgtggtttcgaactcgaaggtcagctcgccgtccttcaggtcgatgtgcaccacgccaccatggtcggagagctcgccaaacaggatctcttcggccagtggccgcttgatcttgtcctggatcagacgcgccattgggcgtgcgcccattgccgcatcgtaaccgccttcggccagccaactgcgcgccgcgtccgtgacctccagctgcacgcgcttgtcttccaactgcgcctggagctcggtaaggaacttgtccaccacacttttgataacctcatggctgaggcgaccaaactggataatggtgtccaggcggttgcggaactccggcgtgaagctcttcttgatcacttccatggcatcagacgagtggtcctgatgcgtgaagccgatcgaagcccgcgcggccgtttcggcaccggcgttggtggtcatgatcacgatcacgttgcggaagtccgccttgcgcccgttgttgtcggtcagggtgccgtggtccatcacctgcaacagcaggttgaagacttcagggtgagccttctcgatttcatcgagcagcaatacacaatgcggttgcttggtaatcgcctcggtcaacaggccgccctgatcaaagccgacataacccggaggtgcgccgatcaggcgcgacacggtgtgacgctccatgtattcggacatgtcgaaccgcaccagctcgatacccatggccttggccaattggcgcgccgcttcggtcttgccgacgccggtcgggccggcgaacaggaacgaacccaccggcttgtctggcgacttgaggcccgcacgcgacagtttgatcgcagtggacagcgagtcgatggccgcgtcctgaccgaacacggtgagcttgaggtcacgctccaggttacgcagcagctccttgtcggaactggtgacgtgttttggcggaatccgcgcgatcttcgccacgatgtcctcgacctgcggcacgtcgatgcgcttcacacgcttctcgaccggctgcaggcgctgataggcgcccgcctcgtcgatcacgtcgatggccttgtccggcatgtgccgatcattgatgtagcgcgacgccagctcagcggccgaacgcagggcttcatcggtgtactcgatgccgtggtgcgcttcgaagcgccccttgagcccgcgcagaataccgatggtgtcttctaccgaaggctcggacacgtcgaccttctggaagcgacgtgccagggcacggtctttctcgaagatgccacggaattcctggaacgtggtcgagccgatgcagcggatatcacccgacgacagcagcggcttgagcaggttggaggcatccatcaccccaccggaggccgcaccggcaccaatgatggtgtggatttcgtcgatgaacaggatcgcctgcgggcgttttttcagctcacccagcagcgccttgaagcgcttctcgaagtcgccacggtacttggtcccggcgagcaaggcgcccagatcaagggagtagacgacgctgttggccagcaggtccggcacctggttgtccacgatgcgcttggccaggccttcggcaatcgcggttttacccacgcctgcctcgcctaccagcaacgggttgttcttgcgacgacgcgcgaggatctgcgctacacgctcaacctcaagctcacgccccaccagcggatcgatccgcccctggcgcgccagctcgttgaggttgctggcataggcatccagtggattgcccgaagaagaagactcaccgccctcgtcgtcctgcatatcctgctcaccctcggaatgatcgccgtgcccgggcaccttggagataccgtgggcgatgtagttgacgacatcgatacgggcaacgctctgctgtttaagcaggaacactgcctggctttcctgttcgctgaaaatcgccacaagcacattggcgcctgtgacttcacgcttaccggagctctgaacatggaacacggcacgctgaagcacccgctggaagcccagggttggctgggtctcacggtcttcatcgtggactggaataagtggcgttgtggagtcgataaactcctgcaggtcatgcttgagtttgtcgaggttggcgccgcacgcacgcaaaacggtggcggcagcttcgttatccaaaagtgccagcagcaggtgttcgacggtcatgaactcatgacgcttcgaacgagcctccttgaaggcaagattgagggtgacttcgagctcgcggtttaacatagcttcacctcatacccaagtggtcggcgttaaccgtccttctcgatttcacagagtagcggatgctggctttccctggcgtactggttgacctgcatggcctttgtctcggcgatgtcgcgggtaaacactccacatactgcccgtccttctgtgtgaacggccagcattaccttggtcgccaactcgcggttcaggttaaaaaacacctcgagtacttcgaccacgaaatccatcggtgtgtagtcatcattgaacaaaaccaccttgtacatcggcggcgcctgtagagcaggcttggcctcctgaacagcaatgcctgcagaaccgtcgtcatcatgttcctgatccggtcgatcctgattgaatgttagtcgaatctggctgtttgcatgcatggaaagaaaggttcgtcagtggttcaaatacagtggtgggggcgacctgtcagattttcaactactgaccgactggtcgccttgactatcggcgaaacggtgttacaaccaatagaacccacagtgggtaaaaaaggtccgcgcagtcaaccttatttattcgggttaggacggataaactggatgatactccagtgatggagtctggtgcagagggatatgggcatggcaagcggtaaggtcaagtggttcaacaatgccaaaggttacggcttcattaatgaagacggcaaggatgaagacctttttgcgcattactcagcgatccaaatggacgggtataaaacgctgaaagcggggcagccggtctcctttgacattattcaggggcccaaaggcaagcacgcagtcgcaatcagtgcgccagtcaccatcggcacagcaaaagacggcgtcgctcaaaaaccaaaagagcaactggcctgatcggccaccgagcaagcgcctaataaaaaaccggccattccgtttacggtatggccggtttttttattgccaatcgcttacatatgcgagatcagcgcatcaccaaagcccgacgacgacaccagcttcgcaccctccatcagacgctcgaagtcataagtcacggtcttggccgaaatcgcaccattggtgcccttgatgatcaagtcagccgcctcgacccagcccatgtgacgcaacatcatttccgccgacaaaatcaacgaacccgggttgacctggtccttgcccgcatacttgggcgcagtaccgtgggtcgcctcgaacatcgccacggtatccgacaggttggcgcccggcgcaataccaataccgcccacttccgccgccagggcatcagacaggtagtcgccgttcaggttgagggtcgcgatcacgtcatattcagccggacgcagcaggatctgctggagcatggcgtcggcaatcgcatccttgaccaccacgttcttgccggtcttcggattcttgaactgcatccaagggccgccgtcgagcagcgtggcgccaaattcttgcgccgccacctcataggcccattccttgaaggcaccttcggtgaacttcatgatgttgcctttgtgcacgatggtcagcgaatcgcggtcgttatccactacatattgcagggctttacgcgccaggcgctgggtgccctctttcgagaccggcttcacgccaatcccgcaatcctggtcgaaacggatcttggtcacgcccatttcttccttgaggaacttgatcaccttgatcgcttcgggcgaaccggccttccactcgatcccggcataaatgtcttcggagttttcccggaagatggtcatgtccacgtcgccgggcttcttgaccgggctgggcacgccttcgaaccagcgcaccgggcgcaggcacacatacaggtcgagttgttggcgcagggccacgttcagcgaacggatgccgccccccaccggggtggtcagcgggcctttgatggaaaccacgtaatccttgaccgcatccagggtttcctggggcagccaggtgtcctggtcgtagacttgagtcgctttctcgccggcaaaaacctccatccacgagatcttgcgcttgccgccgtaggccttttcaacagctgcgtcgactaccttgatcatcaccgggctgatgtcgacgccgataccgtcaccctcgatgtaggggatgatcggttggtcaggaacattgagagaatggtctgcattgacggtgattttgtcgccgactgccggaacctgaatcttcttgtatcccatgctgaactccatctatggattgaacatctggctgcgttcgagcctactccagataaatggcgactgaaacctcgcgccatgctcatttgcttcgaaaacagcataatttgtcgcctacaagcctgaaagaaaaggcaaaatcgccaatcttgagcacatcgtgcgactttggtcgcaatcgcgcacctgcgacctttagaccaatggacgacacaccttttgtatgaaggctcggcgtaagcatagcgacctatgtataatgccgccgctgaccaaagagtcacgacggcggaccgctctagaacacagccttccgctacaaagcaggactattacaatagtccacccgcttgacgctcgactgatgcaacccaacatcaccgcgaagaaacctcgacatttcgctcatggatgactttgaacgaacgcgctccacccggcgcatctcgagtttctgcgcacgctttcagcaaagaagagagttaatccgaatatgcccacccgctcgaagatcatctacaccttcaccgacgaagccccggccctcgccacctattcactgctgcctatcgtagaggccttcaccgcttccgctgatattgccgtggaaacccgcgacatctccctcgccgcgcgcatcctcgcaagcttccccgagcaactgggcgccaaggctatcccggaccacctcgccgaactgggcgacctggccgttacgcctgaagccaacatcatcaagctgcctaacatcagcgcctcgactccgcagctgcaagccgcgatcaaggaactgcaggcccagggctacgccctgccggactacccggaaaccgtaaccaccgacgcggaaaaagaaacccgtgcacgttacgacaaggtcaagggcagcgccgtgaacccggtactgcgcgaaggcaactccgaccgccgcgcaccgctgtcggtcaagaactacgcacgcaagcacccgcacaaaatgggcgcctgggctgccgactccaagtcgcacatcgcccacatgagcaacggcgacttctacggcagcgaaaaagccgtacagatcgaaggcgctgatgctgtcaaaatcgagctgatcgcccaggacggcaccgccaccgtcctgaaggaaaagacctcggtacaggcaggcgaaatcatcgacaccgccgtgctgagcaagaaggccctgcgcgcattcatcgccgctgagatcgaagacgccaagaaacaaggcgtgctgctgtcggttcacctgaaagccaccatgatgaaggtctccgacccgatcatgttcggccagatcgttgccgagttctataaagacgccctggccaagcacgccaccgtgctggaacagatcggcttcaacctgaacaacggtatcggcgacctgtacgcgcgcatcaaggccctgccggccgagcagcaagcacagatcgaagccgacatcgcagcggtctacgccgctcgccctgccctggcgatggtcaactccgacaaaggcatcaccaacctgcacgtgccgagcgacgtgatcgtcgacgcctcgatgccagccatgatccgtgactccggcaagatgtggggcaccgatggtcagctgcacgacaccaaggcggtgatcccggatcgctgctacgccaccatctaccaggctgtcatcgaagactgcaaagccaatggcgccttcgacccaaccaccatgggcagcgtgccgaacgttggcctgatggcgaagaaagccgaagagtacggctcccacgacaagaccttccagatcaaggctgacggcgtagtccgcgtcaccgacagcaagggcaacctgctgatggaacagaacgtcgaagccggcgacatcttccgcatgtgccagaccaaagacgcgccgatccaggactgggtcaaactggccgtcaaccgtgcccgcgccagcaacaccccggccatcttctggctggacccacagcgcgcacacgacggcgtcgtggtcgagaaggttcaggcttacctgaaagaccacaacaccgaaggcctggacatccgcatcatgtcgccggtcgacgcgatgaagttcaccctggagcgcacccgcaagggcctggacaccatctcggtgaccggcaacgtactgcgcgactacctgaccgacctgttccctatcatggaactgggcaccagcgccaagatgctgtcgatcgtgccgctgatgaacggcggtggcctgttcgaaaccggcgccggcggttcggcaccgaaacacgtgcagcaactggttgaagagaacttcctgcgctgggattccctgggcgagttcctggccctggccgcctcccttgagcatttgggtgtgacgtacaacaacccgaaagccctggtcctgtccaagaccctggaccaggccaccggccagttcctcgacaacaacaagtcgccatcgcgcaaagtcggcaacatcgacaaccgcggcagccacttctacctggcgctgtactgggctcaagccctggccgcccagaccgaagacactgcactgcaagcgcagttcggcgaactggccaagaccctgaccgcgaacgaggcaaccatcgttgccgagctcaacgccgtccagggcaagccagtggacatcggcggctactacgcgccgaacccggaactgaccagcaaggccatgcgcccaagcaacaccctcaatgcggcgattgccaagttgaagtaaggttgtaaggatgtaaagaagccccggccccgtgccggggtttctgtttaatgtgctttcttgctgaaaaaacccaatcaaactgtgggagggggcttgccccccgatagcagtaggtcaggcacagatagttcaactgacactccctcatcggggcaagccccctcccacactgactattatcctgtttcaggactgcaccgcatcttaaatccagaggcaaccatgacctggcaaccccacatcaccgtcgccaccatcgtcgaagacaacggcaagttcctgatggtcgaagagctcaagggcggccgcgccgtgctcaaccagcctgccggccacctcgacccagacgagaccctgaccgaggccgccgtacgcgagaccctcgaagaaaccggctgggacgtcgaagccatcggcatcgtcggcatctacctgtacaccgcccccagcaacggcgtgacctaccaacgggtctgcttcatcgccaaggccctgaaacaccacccggactatcaactcgacgaaggcatcctccgcgcccgctggctgagccgtgacgagctgatgagcgtgcgcgacgactggcgcagcgagctgatcatccgctgtatcgatgattatctggccggccactgccacagtctcgaattgatccgcccttctctttagccttgaaggcccgagcctgatagaatcgcgtcctttttcaagacacccgttgaaaccctatgcgtgatccagccccttctgacacacaaaagaagcgcgtcatcgtcggcatgtccggcggcgtggattcttccgtttccgccgttctgctcatggagcagggttatgaggtggaaggcctgttcatgaagaactgggaagaagacgatggaacggaatactgcaccgccatggacgacctggcggatgcccaggccgtgtgcgacaagattggcatcaagctgcacaccgccaacttcgccgccgagtactgggacaacgtgttcgagcacttcctggccgaatacaaggccggccgcacgccgaacccggacatcctgtgcaaccgagagatcaagttcaaggcgttcctcgactacgccatgatgctcggtgccgacctgattgccactggccactacgtgcgccgccgcgacatcgatggccgcaccgaactgctcaagggcctggacccgaacaaggaccagagctacttcctgcatgccgtcggcggcgaacagatcgccaagaccctgttcccggtaggcgagctggaaaaacccgaagtgcgcagaatcgccgagaaacacggcctggctaccgccaagaagaaggattccaccggcatctgctttatcggcgagcgccgcttcagcgacttcctcaagcaatacctgccggcgcaaccgggtgagatccataccaccgaaggcgaagtcatcggccgccaccatggcctgatgtaccacaccatcggccagcgccagggcctgggcatcggcggcttgaaagacgccggtgaagagccgtggtacgtgctggtcaaggacttggaaaacaacgtgctgatcgtcggccagggcaacgaacacccactgctgttctccggcgccctgctcgcctccgagatctactgggtcaacccgatcgacctgagcacgccacgccgcctcaccgccaaggtgcgctatcgccagagcgaccagccgtgcaccctggaaaaaaccgccaccggctaccgtgccacctttgatgacccgcaacgcgcggtcaccccaggccagtccgtggtgttctacgatggcgaaatctgcctgggcggcggcgtgattgaaatcgccgaagcctggagccacaaggcatgagcccgacccaggagcaattgacggcactgggcggggtgttcctcgccgcggtattggtggacaagatcgccaagaccggccaggtcaccgaagccggcctgacctgcatgctcggcagcctgctgatccgcgaccccaaggacactctggaagtctacggtggcgacgacctggcgctgcgtgaaggttaccgcgcactgatcggcgccctggagcgcgaccccagcaccctgcagcgcgagccgctgcgctatgccctgtcgatgctcggcctggagcgccaactggccaagcgcgaggacatgctggaggtcatcggcaaacgcctgccgcagatccagtctcaggtggaacacttcgggccggcccacgagaacgtaatcgccgcctgtggcgcgttgtaccaggacaccttgagcaccttgcgccagcgcatccaggtgcacggcgacatgcgcaacctgcaacaaccgaacaacgcctcgaaaatccgcgccctgctgctggccggtattcgttcggcgcggttgtggcgccagttgggcggccatcgttggcagctggtgatcagccgtcgcaaattgctcaaagagctttacccgttgatgcgcaacgaataagtcgcagcagcaggccattttcaagccgttacgcgtaatacgccggtcagttggcaacggaccggcggattttttcatgtatgatacgcgccccatttcgttgcccgactgtccgagaacaccccatgcagctctcttcgctcactgcggtttcccctgtagacggccgctacgccggcaaaacccaggccctgcgccctattttcagcgaatacggcctgatccgtgctcgtgtactggttgaagtgcgctggctccagcgcctggccgctcaccccgccatcagcgaagtgccggcgttttccgccgaagccaacgctgtgctcaacaccctggcggaaaacttctccctggagcacgccgagcgtgtgaaagagatcgagcgcaccaccaaccacgacgtcaaagccatcgaatacctgctcaaagagcaagcggccaagctgccggaactggcccaggtcagcgaattcatccactttgcctgcaccagcgaggacatcaacaacctgtcccacgccctgatgctgcgcgaaggccgtgatgacgtgatgctgccgctgatgcgccagaccgccaacgccatccgcgaactggcgatccgcttcgccaacgtgccgatgctgtcgcgcacccacggccagccggcgtcgccgaccaccctgggcaaagaactcgccaacgtggtgtaccgcctggagcgccagatcgctcaagtcgccgccgtaccgctgctgggcaagatcaacggcgccgtgggcaactacaacgcccacctgtcggcctaccctgagatcgattgggaagccaacgcccgtgccttcatcgaagatgagctgggcctgggcttcaacccgtacaccacgcagatcgaaccgcacgactatatcgccgagttgttcgacgccattgcgcgcttcaacaccatcctgatcgacttcgatcgcgatatctggggctacatctccctgggctatttcaagcagcgcaccattgccggtgaaatcggttcgtcgaccatgccgcacaaggtcaacccgatcgacttcgaaaactccgaaggcaacctcggcatcgctaacgccctgttccagcacctggccagcaagttgccgatctcccgctggcagcgcgacctgaccgactccaccgtactgcgcaacctcggcgtaggcttcgctcacagcgtgatcgcgtacgaggccagcctcaaaggcatcagcaagctggagcttaacgagcagaagatcgccgctgacctggacgcgtgctgggaagtcctggccgagccaatccagaccgtgatgcgccgctacaacatcgaaaacccatacgagaagctcaaagagttgacgcgcggcaagggcatcagccctgaagcgctgcagactttcatcgacggcctggacatgccagccgccgccaaggccgagctgaaactgctcaccccggccaactacatcggtaacgctgtagagcaagccaagcgcatctgatcatcgcaagaccctttgagacgcccggccgcgccgggcgtttttattccagtctgaaaagtgctttttttcaataggttacacatgaatcctgatatccctcttcaacttctgggcggcatcacggcacgggaattcctgcgcgactactggcagaaaaaaccgctgctgatccgccaggccattcctgatttcgaaagcccgatcgacgccgacgaactggccggcctggcgctggaagaagaagtcgagtcgcgcctggtgatcgagcacggcgagcgcccctgggaactgcgccgcggcccgttcgccgaagacgccttcagcaccctgcccgagcgcgagtggaccttgctggtgcaagccgtcgaccagttcgtaccggaagtggccgagctgctggagcagttccgcttcctgccgagctggcgcatcgacgatgtgatgatcagcttcgccgcaccgggcggcagcgttggcccgcacttcgacaactacgacgtgttcctgctgcaagcccagggcaagcgcaactggaagatcggccagatgtgcagctccgaaagcccgctgctgcagcacgccgacctgcgcatcctcgccgaattcgaagaaagcgccgagtgggtcctggaaccgggcgacatgctctacctgccaccacgcctggcgcatttcggcattgccgaagacgactgcatgacctattccgtgggcttccgtgcaccgagcgcggccgaagtgctgacccacttcaccgacttcctcagccagtacctgaccgacgaagagcgctacaccgacgctgacgcccagccggtcagcgacccgcaccagatccagagcgacgcgctggaccgcctcaagagcctgctggccgagcacatgagcgacgagcgcatgctgctgacctggttcggccagttcatgaccgaaccgcgctacccagaactggtagccggcgaagagttgggcgaagacgacttcatcagcagcctgcaagatggcgccatcctggtacgcaacccgagcgcgcgcctggcctggtccgaagtggacgacgatgtattgctgttcgccagtggccagagccgttacctgccaggcaaactgcgtgagctgctcaagctggtgtgctcggccgatgcgctgcacagcgagaacctgggcgaatggctggcggacgaagacggccgcgatctgctgtgcgaattggtcaagcaaggaagcctgggatttgccgatgaataggattcacgtaagtgtcgcggactggcaaaaggatatcgccgagattcggcgcattcgtgaagcggtgtttatcgctgaacaatcggttccaccggagctggagtgggacgcggacgacgccggcgcagtgcatttccttgcattcgaaggtaattttccgatcggcaccgctcgcctgctgcccagcggcgagatcgggcgcgtgtcggtactcaaggattggcgcgggcttaaagtcggcgacaagctgatggaagcggtgattggcgtggccgagcaacgcggccagaccaagcagttcctgagtgcgcaggtgtatgccgcgccgttctatgagcgactgggcttcaagatcgtcagcgacgaattcctggaagtcgggattccgcatgtggatatggtgcgcgagggctgattcgagaccgcgtcgctgccatcgggggcaagtcgaatcgtcgcaccgcccctcccacattttgaccgagtaagtcctttggaatgcggtcaagtgtgggaggggcggtgcgacgattcgacttgcccccgatagccatttcagcaacaccaacaatgccctgccatgccagggcattttgccgtctaggattcaacttgcacccggccaggccgacaaactggcactatcaagcctaaatgactcgcagagataacggacatgtccctacgcaccctgctcaccgccctcctgttagccaccagcgtcacggccatggccgacaccgaagtggtcaacctgagcaaccgtaccagcgcagacctgctgcccgtggcgcagaacttcatcggcaaggacggcaccgtcagcgcttatggcaaccagctgatcgtgaaggccgaccccggcaagatccaggacctgcgcgccttgctgtctcagctggacactccggccaaacgcctgctgatcaccgtcgacaccaacgaaaacaaccagcagaacaccggtgacagccagacgcgcatcatcagctacggcaccaccagccgcgacggcggtacgcagcagatccaggccagcgaaggcgtgcctgcgctgatccaggtcggccagagcgtaccgctgaccaccacccagcaagatagctacggccgcctgcaaaatcagacccagtatcgcaacgtgacccagggcttctatgtgaccgcgagcgtcaccggcgagaccgtgcacctggcgatcagcaccaatcgtgaccgcatgagccaggagcgtcccgatgtagtgaacgtacagagtaccgacacaaccatcagtgggcgcctaggcgagtggatcaccctgtccggcatcaatcgcgagacccaggctgataaatcctctacaacccgcagctactctactcagggccgtgatgacctgacggtgcgggtcaaggtcgacaccctgaactgaagcaccaaaaactgactgatgagtcgtattagactaaagatgtagtgcttgaaaaaaagcactacaaaacatttgacgatccaaaaaagcctgggcatgatggcctcgctcccgctaatcaggggccctggcaagggccttcggatcgcgctccaagctacccacctgagccgattcgtgtctgtaccgcccacaaggcgtgtttgacgaggttgcgactggaacgaagttgtcccgagggacggaagctaaccaggtaacccggctacacgctgttgaacacccgagggcccacgacgcccgaagactgttctcggcccgcctgtacctgcccgaccctctcgccactcgttcatcccgtcgcattccccgccagacccgacatgaccgcctaagcttctggtcagcgagcagccctgcccacgcacttgaatgcagggctggcaaatggatttttccaccacacgaagacgcgacgaggtttacttccatggcactgacacgcgaacagcaaattgcagccctcgagaaagactgggctgaaaacccacgctggaaaggcgtgacccgcgcttattccgctgctgacgtcgtccgcctgcgtggctcggttcaacctgagcacacctttgcaaaactcggcgccgagaagctgtggaagctggttacccaaggggccaagccttccttccgtcccgacaaagatttcgtcaactgcatgggcgccctcactggcggccaggcagtccagcaggtgaaagccggtatccaggcgatctacctgtccggctggcaagtggcggcggacaacaactccgccgaatccatgtaccccgaccaatcgctgtacccggtggactcggtgccgaccgtggtcaagcgcatcaacaactcgttccgtcgcgccgaccagatccagtggaaagccggcaagaacccgggcgatgaaggctacatcgactacttcgcgccgatcgtggccgacgccgaagccggtttcggcggcgtactcaacgcctacgagctgatgaagagcatgatcgaggcaggcgctgccggcgtgcacttcgaagaccaactggcttccgtgaagaaatgcggccacatgggcggcaaggtcctggttccaacccaggaagctgtacagaagctgaccgctgcccgcctggccgctgacgttgccggcacgccaaccatcatcctggcgcgtaccgatgccaacgcggctgacttgctgacttcggactgcgacccgtatgaccagcccttcgtgactggcgagcgcacccaggaaggcttctacaaggtacgtgccggtctcgaccaggccatcgcccgcggcctggcctacgcgccgtacgccgacctgatctggtgtgaaaccgccaagccggacctggacgaagcccgtcgtttcgccgaggcgatcaagaaggaatacccggaccaactgctgtcctacaactgctcgccgtccttcaactggaagaagaacctggacgacgcgaccatcgccaagttccagcgcgaactgtccgccatgggctacaagcaccagttcatcaccctggccggcatccacaacatgtggcacagcatgttcaatctggcgcacgactacgcccgcaacgacatgaccgcctacgtgaagctgcaggagcaggagttcgctgacgccgccaagggttacaccttcgtggctcaccagcaggaagtgggcaccggctacttcgacgacatgaccaccgtgatccagggcggcacctcgtccgtgaccgcgctgaccggctcgaccgaagaagagcaattccactgatcgactgagtacacggccactgcggccccaaggaagacctaaccgcagtgccgcacaaagatcacgccccgacctgttcggggcgttttttttgccccgtgaaaaacctccctgtcaaaatgaagatcaacctgtgggagggggcttgcccccgatggcggcgggtcaatcacagacgtatcaactgacatcccgtcatcgggggcaagccccctcccacactggaaatgccgacgcggctctggattttgtgcaaaacattgatccagagcggtattggcacgaataaaatcggttaaaagatccccgtcggcaactaagcggtattcaaccaagtaacagcaacttccctcgccccaccacacacacccgcttaaaatccgcgcaaacaatattcattatcatttagcgcatgaaaacttcgttaccggttaaacaaaacacatttgattaaatgcccgctaatgcccgccacataagggctgcagccccaagaaggtgcactatgtgcttattccaccgaataatttcgccataggaattttacttgcccggtgtttagccataaaatcaccgcgattgattgcagtgcgacatatcgtcactgcatcgttactttttcgagctcagagacctttgctctctgttaaggatttccagcatgaccgaagcgacaggactcatggcccacaactggggctttgccattttcctcctcggtgttgtcggcctctgcgccttcatgctcggtgtttccagcctcctcgggtcaaaagcctggggccgcagcaaaaatgaaccgttcgagtccggcatgctgcctacaggtggcgcccgcttgcggctctcagccaaattctatctggtcgcgatgctgttcgtgatcttcgatatcgaagccctctttctctttgcctggtctgtgtccgtccgcgaaagcggctggaccggattcgtcgaagccctcgttttcatagcaattctgttggcaggccttgtctacctattccgagtgggcgcccttgactgggctccggaagctcgtcgtaagcggcaagcgaagctgaaacaatgaggctttggcgatgcaatacaatctcaccaggatcgacccggatgctcctaacgagcagtaccccatcggcgaacgggaaaccgtttccgacccgttagaagaccaagtccacaaaaacatctacatgggcaagctggaagacgtgctgagtggcgcggtcaactgggggcgtaaaaactccctgtggccgtacaacttcggtctttcgtgctgctacgtggaaatgaccaccgccttcacggcgccccacgacatcgcgcgctttggcgccgaagttatccgggcctcgccgcgccaggcggatttcatggttatcgccggtacctgcttcatcaagatggcgccgatcatccagcgtctctacgagcaaatgctcgagccgaagtgggttatctccatgggttcgtgcgccaactccggtggcatgtacgacatctattccgtcgttcaaggggtggacaagttcctgcccgtggacgtctacgtgcctggctgcccgcctcgccctgaagcgttcctgcaaggcttgatgctgttgcaggaatcgatcggcaaggagcgtcgtccgctttcctgggtcgtcggtgatcaaggcgtgtaccgcgccgagatgccgtcgcaaaaggaacagcgccgcgaacagcgaatcgcagtcacaaacctgcgcagccccgacgaagtctgatccagcaccgcttcttttatagaacgaacacctggcttcattctttacgttgaccgaaagcgataaaaaaccatgactacaggcagtgctctgtacatcccgccttataaggcagacgaccaggatgtggtcgtcgaactcaataaccgttttggccctgacgcctttaccgcccaggccacgcgcaccggtatgccggtgctgtgggtggcgcgtgccaagctcgtcgaagtcctgaccttcctgcgcaacctgcccaagccgtacgtcatgctctatgacctgcatggcgtggacgagcgtctgcgcaccaagcgccaggggctgccgagcggcgccgatttcaccgtgttctaccacctgatgtcgctggaacgtaacagcgacgtgatgatcaaggtcgcactaaacgaaagcgacttgagcatcccgaccgtcaccggtatctggccgaacgccagctggtacgagcgcgaagtctgggacatgttcggcatcgacttcccgggccacccgcacctgacgcgcatcatgatgccgccgacctgggaaggtcacccgctgcgcaaggacttcccggcgcgcgctaccgaattcgacccgttcagcctcaacctcgccaagcagcagcttgaagaagaggctgcgcgcttccgtccggaagactggggcatgaagcgctccggcaccaacgaggactacatgttcctcaacctgggcccgaaccacccttcggcccacggtgccttccgtatcatcctgcaactggacggcgaagaaatcgtcgactgcgtgccggacatcggctaccaccaccggggcgccgagaagatggccgagcgccagtcgtggcacagcttcatcccgtacaccgaccgtatcgactacctcggcggcgtgatgaacaacctgccgtacgtgctctcggtcgagaagctggccggtatcaaggtgccggatcgcgtcgacaccatccgcatcatgatggccgagttcttccggatcaccagccacctgctgttcctgggtacctatatccaggacgtcggcgccatgaccccggtgttctttaccttcaccgaccgtcagcgtgcctacaaggtcatcgaagccatcaccggtttccgcctgcacccggcctggtaccgcatcggcggcgtggcccacgacctgccgaatggctgggaacgcctggtcaaggaattcatcgactggatgcccaagcgtctggacgagtaccaaaaggcggcgctggataacagcatcctcaagggtcgtaccatcggcgtcgcgcagtacaacaccaaggaagccctggaatggggcgtcaccggtgccggcctgcgttccaccggctgcgatttcgacctgcgtaaagcgcgcccgtactccggctacgagaacttcgagttcgaagtgccgctggcggccaatggcgatgcctacgaccgctgcatcgtgcgcgtcgaagaaatgcgccagagcctgaagatcatcgagcaatgcatgcgcaacatgccggccggcccgtacaaggcggatcacccgctgaccacgccgccgccgaaagagcgcacgctgcagcacatcgaaaccctgatcacgcacttcctgcaggtttcgtggggtccggtaatgccggccaacgagtccttccagatgatcgaagcgaccaagggtatcaacagttattacctgacgagcgatggcggcaccatgagctaccgcacccggattcgtaccccaagctttgcccacttgcagcagatcccttcggtgatcaaaggcgagatggtcgcggacttgattgcgtacctgggtagtatcgatttcgttatggccgacgtggaccgctaagcatgaacagcacgcttatccagacagaccgtttcaccttgagtgaaaccgagcgctcggccatcgagcacgagctgcatcactacgaagacccgcgcgcggcgtcgatcgaagccttgaagatcgtccagaaagaacgtggctgggtgccggacggcgccctctacgccatcggcgagatcctcggcatccccgccagcgacgttgaaggggtggccacgttctacagccagatcttccgtcagccggtgggccgccacatcattcgcgtgtgcgacagcatggtctgctacatcggcggccacgaatccgtggtcagcgagatccagaacaagctgggcatcggcctcggccagaccactccggacggccgcttcacgctgctgccggtgtgctgcctgggcaactgcgacaaggcgccggcgttgatgatcgacgacgacacattcggtgacgtgcagcctgctggcgtgacccaattgctcgagggctacccatgaccctgacttctttcggcccggccaacctgatcaagcgttcgcccgagacccacccgctgacctggcgcctgcgtgacgatgccgagccggtatggctcgacgaataccaggccaagaacggttacgccgctgcgcgcaaagccttcgccgacatggcccaggacgatatcgtccagaccgtgaaagacgccggcctcaagggccgcggcggtgcaggcttccccacgggcgtgaagtggggcctgatgcccaaggacgaatccatcaacatccgctacctgctgtgcaacgcggatgaaatggagccgaacacctggaaagaccgcatgctgatggagcaactgccccatctgctgatcgaaggcatgctgatcagcgcccgcgcgctgaaaacctaccggggctacatcttcctgcgtggcgaatacaccaccgccgccaagcacctcaaccgtgccgtggaagaagccaaggccgccggcctgttgggcaagaacatcctcggttcgggttttgacttcgaactgttcgtgcacaccggcgccgggcgctacatctgcggtgaagaaaccgcactgatcaactccctcgaaggccgccgcgccaacccgcgctccaagccgcccttccctgccgccgtaggcgtgtggggcaagccgacctgcgtgaacaacgtcgagaccctgtgcaacgtgccggcgatcatcgccgacggcgtggactggtacaaatcgttggcccgcgaaggcagcgaagacatgggcaccaagctcatgggcttctccggcaaggtcaagaacccgggcctgtgggagctgccgttcggcgtgaccgcacgcgagctgttcgaggactacgccggcggcatgcgcgacggctacaccttgaaagcctggcagccaggcggcgccggtaccggtttcctgttgcccgagcacctcgacgcacaaatgtatgccggcggcatcggcaaggtgggcacccggatgggtaccggcctggcgatggcggtcgacaacaccgtgaacatggtgtccttgctgcgcaacatggagcagttctttgcccgcgagtcctgcggcttctgcaccccatgccgcgacggtctgccatggagcgtgaagctgctgatggccctggaaaacggcgaaggccgcgagggtgacatcgagaccctgctgggtctggtcggtttcctcggcccaggcaagaccttctgtgctcacgcaccgggcgccgtggaaccattgggcagcgcaatcaaatacttccgctcggagttcgaagccggcatcgcgcctaccagtgccgccgtcccgcctctggcgaggccgatcgtagtcggcgcgtaacgctttaacaggtgaagggtccgtgcccttcacctgctcatgggctgacgccgtaaaggctgtgttgacgcccatgaataacaagattccattagccacgcccgctgacaacgggccaacgaagaactttgaaccatggccactatccacgtagacggcaaagcgctcgaagtcgatggggcagacaacctgttacaggcatgtctctcactaggcctcgacatcccatatttctgctggcatcccgcgcttggtagcgtcggggcctgtcgccagtgtgcggtcaagcaatacaccgacgagaacgacacccgtggtcgtatcgtcatgtcctgcatgaccccagccaccgacaacacctggatctccatcgacgatgaagaatccaaggcgttccgcgccagcgttgtcgaatggctgatgaccaaccacccccacgactgcccggtctgtgaggaaggcggtcactgccacctgcaagacatgacggtgatgaccggccacaacgagcgccgttatcgcttcaccaagcgtacccaccagaaccaggacctcggcccgttcatttcccacgaaatgaaccgctgcatcgcctgctatcgctgcgtacgcttctacaaggactacgccggcggcaccgacctgggcgtattcggcgcccacgacaacgtgtacttcggtcgcgttgaagacggcgtgctcgaaagcgagttctccggcaacctcaccgaggtctgcccgaccggtgtattcaccgacaagacccactccgagcgctacaaccgcaaatgggacatgcagttcgccccgagcatctgccatggctgctccagcggttgcaacatctccccgggcgagcgctacggcgaactgcgtcgcatcgaaaaccgcttcaacggttcggtcaaccagtacttcctgtgcgaccgtggccgtttcggctatggctacgtcaaccgcgaagaccgcccacgccaaccactgttggccgacggcgccaagctgagcctggacgacgcgctggataaagccgccgacctgctgcgcggccgcaacatcgtcggtatcggctcgccgcgcgccagcctcgaaagcaacttcgcgctgcgcgagctggtcggtgccgagcacttctactccggtatcgaagccgctgagctggagcgcatccgcctggtcctgcaggtgctgaacgacagcccgctgcccgtaccgaacatgcgcgacattgaagaccacgacgcgatcttcgtgctcggtgaagacctgacccagaccgccgcccgcatcgccctgtcgctgcgccagtcggtcaagggcaaggccgaagacatggccgacgccatgcgcgtccagccctggctcgacgccgcggtgaaaaacatcggccagcacgcgctgaacccgttgtttatcgcgagcatcgctgaaacaaagctcgacgacatcgccgaagaatgtgtacacgcagcgccggacgacctggcgcgcctcggtttcgccgtggcccacgccctggacgcaagcgcgcctgccgtcgacggcctggacaccgaagccgtcgaactggcccagcgcattgccgacgccctgctggcggccaaacgcccattgatcattgccggcacctcgctgggttccaaggcgctgatcgaagccgccgccaacatcgccaaggccttgaagctgcgcgacaagaacggttccatcagcctggtggtgccagaggccaacagcctcggcctggccatgctcggtggcgagtccctggacgctgccctgcaagcggtgaccgacggcaaagccgacgccatcgtggtgctggaaaacgacctgtacacccgcaccgatgccgccaaggttgacgctgcactgaacgcggccaaagtgctgatcgtcgccgatcaccagaagaccgccaccagcgaccgtgcccacctggtactgccggccgccaccttcgccgaaggcgacggcaccctggtcagccaggaaggccgcgcccagcgcttcttccaggtgttcgatccgaagtacatggatgccagcatcctggttcacgaaggctggcgttggctgcatgccctgcgcgccaccctgctgaaccagccgatcgactggacccaactcgaccacgtcaccgcagccaccgctgccagcgccccgcaactggcgcggattgtcgacgctgcaccgtccgcctcgttccgcatcaagggcatgaaactggcccgtgaaccgctgcgttactccggtcgtaccgccatgcgcgccgacatcagcgtgcatgaaccgcgtaccccgcaagacaacgacaccgcgttcgccttctccatggaaggttactcgggttcggtcgaaccgcgtcagcaggtgccgttcgcctggtcgccgggctggaactcgccgcaggcctggaacaagttccaggacgaagtcggtggtcacatccgcgctggcgacccgggcacccgcctgatcgaaagcaccggtgatgcgctgaactggttcgccgccgtaccgcgtccgttcaacccggcccagggcacctggcaggtcgtgccgttcttccacttgttcggcagtgaagagaactcctccaaggccgcgccggtgcaaagtcgcattcctgaggcctacgtatccgtggccaagtccgaagccgaccgcctgggcgtcaacgaaggtgccttgctcagcctgaacgtggccggccagaccctgcgtctgccgctgcgcatcaacgacgagttgggtgccgggctggttgcactgcctaaaggcctcgccggtatcccgccggcgatctttggcaaaaccgttgacggtctgcaggaggcagcgcaatgacctggttcacccctgaagtgatcgacgtgatcatctcggtcgtcaaggccatcgtgatcctgttggccgtggtcgtcgcgggcgccctgctcagcttcgtcgaacgtcgcctgctgggctggtggcaggaccgctacggtccgaaccgcgttggcccgttcggcatgttccagatcgccgccgacatgctgaaaatgttcttcaaggaagactggaccccgccgtttgccgacaaggtgatcttcaccctggcaccggtcgtggccatgagcgccttgctgatcgccttcgcgatcatcccgatcaccccgacctggggcgtggcggacctgaacatcggcttgctgttcttcttcgccatggccggtctgtcggtctatgcggtgctgttcgccggctggtcgagcaacaacaagttcgccctgctgggcagcttgcgggcttcggcccagaccgtgtcctacgaagtgttcatgggcctcgcgctgatgggcatcgtggtgcaggtcggctcgttcaacatgcgcgacatcgtcgagtaccaggcgcagaacctgtggttcatcattccgcagttcttcggcttctgtaccttcttcatcgctggcgtggccgtgactcaccgtcacccgttcgaccagccggaagcggaacaggaactggccgacggttaccacatcgaatacgccggcatgaagtggggcatgttcttcgtcggtgaatacatcggcatcatcttgatctcggccctgctggtcacgctgttcttcggcggctggcacggaccgttcggcatcctgccgcagttggcgttcttctggttcttcctgaagaccgcgttcttcatcatgttgtttatcctgctgcgcgcttccattccgcgtccacgatatgaccaggtgatggatttcagctggcgcttctgcctgccgctgaccctgatcaatttgctggtgactgctgccgtggtgctgatgcacgcgccagcggctgcggttcagtgaggatttgacccatgttcaaatatattggcgacatcgttaagggtaccggtacccagttgcgaagcctggtgatggttttcggccatggctttcgcaaacgcgacaccctgcaatacccggaagaagcggtgtacctgccgccgcgctatcgcggccgcatcgtactgacccgcgaccccgacggcgaagagcgttgcgtagcctgcaacctgtgcgccgtggcgtgcccggtgggttgcatctccctgcagaaagctgaaaccgaagacggtcgctggtacccggacttcttccgcatcaacttctcgcgctgcattttctgcggcctctgcgaggaagcttgcccgaccaccgcaatccagctcacgccggatttcgagatggccgagttcaaacgtcaggacctggtgtacgagaaagaagatctgctgatctctggtcccggtaaaaaccctgattacaacttctatcgtgttgcaggtatggccgttgccggtaagccgaaaggcgccgcacaaaacgaagccgagccgatcaacgtgaagagcttgctgccttaaggaagaaagatggaattcgctttctatttcgcatcgggtatcgcggttgtgtccacgcttcgcgtgatcaccaacaccaaccctgtgcacgccctgctctacctgatcatttcgctgatcgccgtggccatgaccttcttcagcctcggcgcgccgttcgccggtgtactggaagtgatcgcctacgccggcgccatcatggtgctgttcgtgtttgtggtgatgatgctcaacctggggccggcttcggtcgcccaggaacgcgtctggctcaagcccggcatctggctcggcccggttgtcctggcagcgctgctgctgggtgaactgctgtatgtgctgttcgctcaccagagcggccaggccatcggccacaccaccgtggatgcaaaagccgtgggcatcagcctgttcggcccgtacctgctggtggtcgaactggcgtcgatgctgctgctcgctgcagccgtcaccgccttccacttgggccgcaacgaagccaaggagcaatgacgatgcctgctatccctttggagcatggtctggcggtcgccggcatcctgttctgccttggcctggtcggcctgatggtccgccgtaacattctgttcgtgttgatgagcctggaaatcatgatgaacgccgcggcactggcgttcatcgttgcgggtgcacgttggggccagccagatggacaagtgatgttcatcctggtgatcagcctggcagccgccgaggccagtattggcctggcgatcctgctgcaactgtatcgtcgcttccacacgcttgatatcgacgctgccagtgagatgcgcggatgaacatgatctttctgactttcgtattccccctgatcggtttcctgctgctgtcgttctcccgtggacgctggtcggaaaacctctcggccctggtgggcgtgggttccattggcctgtcggcgatcgtcgccgcctacgtcatctggcaattcaacgtggcgccgccggaaggcggtcactacaccctggtgctgtggcagtggatgtcggtggagggcttcaagcccaacttcgccctctacgtcgacggcctgtcgatcaccatgctcggcgtggtcgtcggcgtgggcttcctgatccacctgttcgcgtcctggtacatgcgcggtgaagccggctactcgcgcttcttctcgtacaccaacctgtttatcgccagcatgctgttcctggtgctcggcgataacctgttgttcctgtacttcggctgggaaggcgtgggcctgtgctcgtacctgttgatcggtttctactacagcaaccgcaacaacggtaacgcagccctcaaggcgtttatcgtcacccgcatcggcgacgtgttcatggccatcggcctgttcatcctgttccagcaagtgggcacgctgaacatccaggaactgctggtgctggcaccgcagaaattccaggtcggtgacttctggatcaccctggctaccctgatgctgctgggcggcgccgtgggtaaatccgcgcaactgccactgcaaacctggctggcagacgcgatggctggccctaccccggtttccgcactgatccacgcggccaccatggtcaccgccggtgtctacctgatcgcccgtacccacggcctgttcaccctggcgccggacatcctgcatctggtcggcatcgtgggtggcgtgaccctggtcctggccggcttcgctgccctggtgcagaccgacatcaagcgcatcctcgcctactcgaccatgagccagatcggctacatgttcctggccctgggcgttggcgcctgggacgcggcgatcttccacctgatgacccacgccttcttcaaggccctgctgttcctcgcgtccggtgcggtgatcgttgcctgccaccacgagcagaacatcttcaagatgggcggcctgtggaagaaactgccactggcctacgccagcttcatcgtcggtggtgccgccctggccgccctgccgctggtgaccgccggtttctactcgaaggacgaaatcctctgggaagccttcgccagcggtaaccagaacctgctgtacgcaggcctggtgggtgcgttcatgacctcgctgtacaccttccgcctgatcttcatcaccttccacggtgaagccaagactgaagctcacgcaggtcacggcatctcgcactggttgccattgtcggtactgatcatcctgtcgaccttcgtcggcgccatgatcactccgccgctgcacggtgttctgccgcaaagcgtcgggcatgccggcggcgcagcccagcacagcctggaaatcgcctcgggtgccatcgccatcgccggtatcctgctggcggccctgctgttcctcggcaagcgtcgcttcgtgacagccgtcgccaacagtggcattggccgcttcctgtcggcctggtggttcgctgcctggggcttcgactggatctacgacaaactgttcgtcaagccttacctcgccatcagccacatgctgcgcaaggacccgctcgaccagaccatcggtctgatcccgcgtgccgccaaggccggtcacaccgccctgagccgcagcgagaccgggcaactgcgttggtatgcagcctccatggctgccggtgctgtgctggtgatcggcgccatcgttgtggtagcggtctgactatgaatattgcgaacctgcgaaaggaaacgagcctgtcatgattctgccctggctaatcctgatcccctttatcggcggcctgctctgctggatgggtgaacgcttcggcgccaccctcccccgctggattgcgttgctgaccatgtccctggaactcgcgctcggcctctggctgtgggcccatggcgactattcatttgctccggcaccgggtgtcgatcccaccttcgcgcttgaattcaagcacgtgtggatccagcgcttcggcatcaacgtgcacctggccctcgacggcctgtcgctgttgatgatcctgctgaccggcctgctgggtatcctctcggtactctgctcctggaaagagatccagcgtcacgtgggcttcttccacctgaacctgatgtggatcctgggcggtgtcgtcggcgtgttcctcgccctcgacctgttcatgttcttcttcttctgggaaatgatgctggtgccgatgtacttcctcatcgcgctctggggtcacagttcttcggacggcaagaaaacccggatctacgcggcgaccaagttcttcatcttcacccaggcttccggcctgatcatgttggtggcgatcctggggctggtgctggtcaacttcaacaacaccggcgtgattaccttcaactacgccgacctgttgaagaccaagatgtccctgaccaccgagtacatcctgatgctgggcttcttcatcgccttcgcggtgaagctgccggtggtgccgttccactcctggctgcccgacgctcacgcccaggcgccgaccgccggctccgtggacctggccggtatcctgctgaagacggcggcctacggcctgctgcgtttcgccctgccgctgttcccgaatgcctcggccgagttcgcgccgatcgccatgaccctgggtctgatcgggatcttctacggtgcgttcctggccttcgcccaaaccgacatcaagcgtctgattgccttctcgtccgtttcccacatgggcttcgtactgatcggcatctactccggcagccaactggcgctgcaaggcgcggtgatccagatgttggcccacggtgtctcagccgcggcactgtttatcctgagtggccagctgtacgagcgcctgcacacccgtgacatgcgtgaaatgggtggcgtatggtcgcgcatcgcctacctgccggcgatcagcctgttcttcgccgccgcgtccctgggcttgccgggcaccggcaacttcatcggcgagttcctgatcctgatgggtgccttcgtgcaaacgccgtggatcagtgcgattgctacctccggcctggtgttcggttcggtctactcgctgatcatgatccaccgcgcctacttcggcccggccaagtccgacaccgtcctgcaagggatggacgctcgcgaactgatcatggtgctcggcctggcggtactgctgatctacatcggcgtgtacccgcaaccgttcctggacacttctgccgcaacgatgcatggcgtgcagcagtggttcggcaccgccttctctcaactcgcttcggcccggtaagagcgctatggaattcacgatccaacactttatcgcgcttgcgccgctgctgatcaccagcctcaccatcgtggtggtgatgctggcgatcgcctggcgccgcaatcactcgcaaacgttcctgctgtcctgtgccggcctgaacctggccctgctgtcgatcatcccggccctcaaggtcgcgccactggcggtcacgccattgatgatggtcgatgacttcgcgctgctgtacatcgcgctgatcctggtcgcgaccctggcctgcgtcaccctcgcccacgcctacatgggcgaaggcggcaccggttacccaggcaacaaggaagagctgtacctgctgatcctgctggctgcggccggtggcatcgtgctggtcagcgcacagcacctggccggcttgttcatcggcctggaactgctgtcgatcccgacctatggcctggtggcctatgccttcttcaacaagcgctccctggaagccggcatcaagtacatggtgttgtcggccgccggttccgcgttcctgttgttcggtatggccctgctctacgccgaagccggcagcctgagcttcaccggtatcggccacgccctggccaccaccagcctgcctgcgccaatcgcccaactgggcctggccatgatgctgatcggcctggcgttcaagctgtcgctggtgccgttccacctgtggaccccggacgtgtacgaaggcgccccggcgccggtggctgcgttcctggcgaccgcgtcgaaggttgcggtgtttgcggtgatggtgcgtctgttccagatctcgcctgctgccaacactggcgtgctgagcaacgtgctgaccgtgatcgccatcgcgtcgatcctgttcggtaacctgctggcgctgacccagaacaacctcaagcgtctgctgggttactcctccatcgcccacttcggctacctgctgatcgccctggtggcgagcaaaggcctggccgtggaagccatgggcgtgtacctggtcacctacgtgatcaccagcctcggcgcgttcggcgtgatcacgctgatgtcctcgccgttcaaaggccgtgacgccgacgccctgtacgagtaccgcggcctgttctggcgccgtccgtacctgaccgccgtactcaccgtgatgatgctgtccctggccggtatcccgctgactgccggcttcatcggcaagttctacatcgtcgcgaccggtgttgaagcacacgagtggtggttggttgcctccctggtactgggcagcgccatcggcgtgttctactacctgcgcgtgatggtcaccctgtacctgatcgagccgaacctgcgccgtgtggatgccgagctgcattgggaacagaaggcaggcggcgtgatgctgctggccatcgccctgctcgcgttcttcctgggcgtgtacccacaaccgttgctgaccctggtgcagcacgcggtattgggcgtttgatcgcttagcgagatgcagtcaacagaacggcgccttcgggcgccgttttgcgtttcaggggcaggggtttttaccctcccctattcacggaaatttcctcacccgcctgcctccccttccggcatctacccgatgaaggccgccgtatggtgtctgcgttttaggaaagttcccacattagggtcacttgaccctttgcgagtgggccaccaaactctacgtaggctacgtacagaacatggatgctctatttatcgaactgccggccttcgagcggcatcgcaaggactatctgagtgacgagcttttccagggttttcaacaagagttgatgaagaacccggaagcaggagatgtgatcgagggaacaggcggactgcgcaaagttcgcttcatcgatgagcgacgcaacaaaggcaagcgcggtggcctgcgggtcatttactactggtggtcgggcggcacgcaattctggctgttcaccctgtacggcaagcacgaacaggatgacctgacaccacagcacaaaaaagccctaaaacacatgctggacagggaaatcaaagcgagaacacatcatgaaacgtgaaatcttttccgaactggtcgaaggcttcgacgccctggcagacgaacgccaaggcaaagtcaccctgcgaacccataaggttcatctcaatcaactggagccgcttaccgccgaggaggtggtggccgtgcgccagcaactcaacctctcccggtcggtgttcgccatgtacctgcgcaccaacacccgtaccctggaaaactgggaacaaggtcgggccaagccaaatgcccaggctgccacgctgattcgcctggtggcacgttttcctgagaccgtggcgcaacttgccgctttgggttgatctgcaattacctcaaaaaaaacgccccggacattgggggcgtttttcggtgcatcgcgtcagaaagcgataccgaccttgaagccgtactcgttacgcttgagcttggtgttgtcagccacttcggagtcaccgtcgagcttgtactcggtgcgggtgtagtacaggcccgcgactaccggcaggtcacccttctgattcatcagcaagctgacttcggcgtaggggttggtgcggtccttgaggtcgacggtgtcgctgccgaaatcatccaccttgagcttggtgcggccatcaatggtacgacgggcaccggcttcgacacgcagggtcatgtcatcgaactggtggttgtagcccagagccgccttggcgaacggcgatttgttggtgagcttcacatcgaggtcgttgatctctggctcgtagcgggtccagctgtagccgccaccgacgatcacgtcgacaaaattgcgcgcatccagcgcggcacgccagccgagatccaggtcagcctggccttccttgagtttgttgtcgctcttttcaccgtacttggcttcgataccggcctggtagataaagccggattcggcggtgagcttgttgccgaagttgtagaacaggccggcctcaggcatgtggctcttgtcgctctcgctgccgccttcgaatttgaagtcgttgtagctgcccaggatcccgaaggtggaaatcgggtcggtggacggtgcggcgaacaccacggcaggcgcagcgaccagcgccagcagtgaggaacccttgaggaattttccgaatagcttggacatcgttttacatctccttgtctggtgagcaaattattcaggaaccgcttcgaaccccggcgcgtgccaaaggttcgaattaatttgcgttgatttggaggtaaaacggttcagcgaaggctctttctcgctattcctgggcagcagcctggaccaagccatcaagggtttgccgaagcgttgccgtatccggcacgcgaatcccgaaggtttcagtcagcacctgcaccacctcatcggcactgccaagcgagcgttttacgctcggccggtccagggagtggatcgcatagtgggcattgttcagggtatggcgcttgcccggcgccaggcgcgcgactttcagttggccgacgaataccgatttcgggtgggtggagacgtaccagttaccgatttcataatcgatatccgcctgtacttgcaggtcgaacacatacaggccgcgccactcctcggccacttgtgcccacaaggtgtaacttccctgcccgtcgaaagtcaggcgatacggttcatgggccgtggcctgcaccgcttcggtgtccagttgcaacgggctgctgggcaccatgccgccaaagccgacatcggtgatgtagcgcacgccgtccagagtcaccaggctcaagcgatgggtacgcgccgtgcgcgcatccggcggcccgcccatcaccacccggccggtgatgccacgcgcctcgaagccgagttcctgcagcaacgccaggaacatctggttcagctcatagcaatagccgccccgcccgtccaccagcactttttgttcaacactgggcaggtcgatcggcaccggcaggcgtatcaggctcgacaggttctcgaaggcaaagctgcacacatggcgcagttgcaggtcctgcaaggtttgcagggtgggcgccggcggcgtgtcataacccaggcgttgcaggtagaggcggctatgggtcagcagaggcatggcacgatccttgggcgcaggaagaaagcgtcactatgccgcgcccgcatgcagattgtcattttgaatgaacctttttgaacgctgccctatccatctataacaacacagggaggcaacatgagtaccgcaaaaatctacacgatcaattatcagctgcacggtcaaccgaaaacctttgtggtgcgtgccgaagtaatgaacaacgccgaggcctggcactgggcggcggtggatgccgatattgcccatgtgagtcgcgtgggacgcgtggggcatgagcaggtcaagaaaaccacccggccctgggcggagaagtttgggattacggatgtcacgtggatcgcacccaagtaagtgaacagcctcaccttgcaaggtggggcttccaacaccctttgcagttgaccgtttgcccatcatgagcagagctaacgcttcagtgaaatcaattcaattttactcgacctgtgccccgcctaaactacatcctaattattgatactcgaaatcaatctggcacctgaacaacccatcaggtgtgtcccagaaatcaggatgtcaggtcaccatgaacagcgagtttgaattcactcttaaaacccagcgtttcgacgaacattatcacccctcggaaaacacgcgcatcaccactaactttgccaacttggccaggggcaaaagtcgccaggagaatctgcgcaacacactgaggatgatcaacaatcgtttcaatgcattggcgcaatgggataaccccaagggtgatcgctaccgagtggaacttgatatcgtctctgttgaaatgaacattgactctgaacagcgtggcaacgccatcccgctgattgaaatattgaaaacaacgattgtcgatcaacacaccgatgaacgcatcgagggtattgtcggcaacaacttctcctcctacgtgcgcgactacgacttcagcgttgccttgtcagcgcacaaccagaatcagaccgagttcagcacacccgagaactttggcgacttgcatggaaaactgttcaagcacttcgtcaactcaaacacgtacaaagaaaacttcaaaaaaccgccggtgatctgcctgagcgtttcaaacaccaggacctatcatcgcaccgaaaaccagcatcctgtactgggttttgaataccaacaggacgcctactccctgacggatgactacttcaataaaatgggattgaaggttcgctacttcatgccttcaaacagtgttgcgccgctggcgttttatttttccggtgatttgctggcggattacagcaacctggaactcatcagcaccatcagcaccatggacactttccagaagatttaccggcccgagatttacaatgccaattctgcagccggcaaatcctaccaacccagcttgaagcaccaggattattcactgacgctgattgtctacgatcgagaagaacgcagccgcctggccattgaacagggaaagtttgtggaagagcacttcatcaaaccctaccaggctgttcttcaacagtggtccgcccactgcgcgctttgacgctttaatactacaaggtcatccctgatgaaaaagttgttacctacttcaaccgccggcagtttgcctaaaccttcctggctggctcaacctgaaacactgtggtcgccatggaaactgcaagatgaggcattgaccgagggcaaacacgacgccttgcgtttgtccctgcaggaacaacaacacgcgggcattgatatcgtcagcgacggcgaacagacgcgccaacactttgtgacgacgtttattgagcacctcagcggtgttgatttcgagaaacgcgagaccgtgcgcatccgtgatcgttatgacgcgagcgtgccaacggtcgtaggggctgtttcccgccagaagccggtgtttgttgaagacgccaagttcttgcgccagcaaaccaagcaacccatcaagtgggcgctgcctggccccatgacgatgatcgatacgctgtacgacaaccattacaagagtcgtgaaaagctcgcctgggaattcgccaaaatcctcaaccaggaagcccttgaactagaagccgccggggtggacatcatccaattcgatgagccggccttcaacgtgttctttgatgaggtgaacgactggggcgtggccaccctggaaagggccattgaaggcctcaaatgtgaaaccgccgtgcatatctgctacggctacggcatcaaagccaataccgactggaaaaagacgctgggatcagagtggcgtcaatatgaagaagccttccccaagctgcagcaatccagtatcgatatcgtctcgctggagtgtcacaactcccatgtgcccatggagctgattgaacttatccgcggcaaaaaagtgatggtcggggccattgacgtggccagccacacgattgaaacgccggaagaagtcgccaacaccctgcgcaaagcattgcagtttgtcgatgccgacaagctctacccttgcacgaactgtggcatggcgccgctgcctcggcacattgccaggggcaagctgaatgcgttgagtgccggcgcagccattgtccgaaacgaactctcgaacccgtagtaagaatgcgcaaggcctgacgatttcaggccttgcctggcgcattcgcacgccccccaattcaggaccgcctatgtcacctcccatcgagcccttgcgctttcgagaagccctcgggcactacgcgtccggtatcacggtgattacctcccacgttgatggcgagccggtcggcttcacttgccagtcgttctacagcgtgtcgatgagcccgccgctggtgtcattcagcgtcatgtccaattcggccagctatcccaggattcgccaggccggccggttcgccgtcaatatcctgtccggcgatcaagtcaggatttccaaccagttcgctcggcgaggcacagacaagtggcacggcgtggagtggcagggatcaccactgggcaacccgctcattgccggcagcctgcactggctggattgcgaaattcacgccgaacacgccgcaggtgatcacctgatcgtgatcggcgaagtgaaagccttgaacctgcatgaagcgactgcttcacagccattactgtatttcaaagggcagtatcgcgacctcgccacgcacgatgcgtgtcggcaagaatgagccgcgagcactgtggccggatcaagtcttcaaatctcccagcggatcgtaaggcggtttgcgctcgtccttgtcggtgtttttctgatccaatggcgcgatagccgggccaatggggtccacctgcggatccgatacatccggtgaatccggatcaaaccccagttcatcctgaccactggaatgctcacccgaagccgggcctttcgctgtgtcactcacggcgttctcctcatttaaagtgggcgagccttgtcatgcaggctttcaaggtcttcctcgacgcgttcaacgtcgtcgtcctgacgctccgccgggtcgttggggcgtaacgcatcgttgtcgcgttcctcctctccgggtgtgcggtcagggttgggggtgccaggcggtggttgcttgtattcgggcatgatggctcacctcaaagggtcttcatcaatttagagaaaccgccgtgcagcatcgttcaacttgtttgcccaagcgtgagatgatgccggccccttctggagagatgacccggatgttcgagctcaaaccctgcgaccctgtcaccttccgtcaacagacccggcgcagcacgctgatcgtggccgtgttgttcgtcgcactggcgatgctgctgtcgagcctggcggtgatgctgtttggtgcgcccggcggtgacaatttccgcttcaatgtcggcggggtgttcgccggggtgctgatcaccctggccctggtgcgtggcccgttctggacccaggcgtggctgacgccggcggtgtatggctggcagctcaagcgcagcctgatgagcgtgaccaatgtgatgcacaaggtcaccgagcgggtgcaggccaatgacccgacggcaatcaaggtgctgcgcttctaccacttgggcttgacgcagatgcatgaactggatgccaactccagcgcccaggtgcagttgctggctgaggtggaggcgcacaaggccaggatgcaggcgctggggatcgacaccgaacaaacccgtctcgaccccgcctggctggcagcctttaaaaccgcttaagccagcatgccgatgcgctgctcgtcgggccagaacagcgccgcctggccgcacggctggccggcgtcatcgagcaaggtccacaccaccccagcatgaatcatgaacggctggttgtgcgcatccacccgccaaccgctgtaaccctcggcgatgccgtgggcggtgacttgctccagcagaagctggcgcgcggcgcgatcgagggccgaggcgctgaagcgtgagggcatgccgataaagctctcgcgcgggtatttgaagcactgcaaggcgcagtcattcacatacgtaaatcgcggatctgcgccgccatcatgggccagcaggctgtagggcgcgtcgctgtgcagccaggccaggcgctgttgcgcgtccaggtgtgccggggccggcagtccctggccagtccagtgtcgataggccttatccagcacgcctacgaaggtttcttgagaggacacgtacaacctcacatcatcagttggaattttttgcccgccagcagaacaccgcgctcacggcgatggctgcaccggccaggccaaacacccacggcgccgaagcgatcggcaacagcaggccggcgagcaaggggccaaggccggcgccgatatcgcgccacacggcattcgaggccaaggccgatacccgcatcgacccggggttgcgctccgctaccagggtggtcaccagcggcagttgcaacgcacgcaacaccagcaccgccgccgcgccgacaatcacccagtaactaccgaacgccgtcagggccagggcactcaggaacgaaaacagcagcagcatcgaggtggcgccaaaacgctgggccgcgcgaccgcccaacgggctcaggagcatttccgagacataacgcagcgccatcaggccgccggcaatcagcaccgcatccccgcccagcagcttctgcgcctggatcgacaggccgaagataaacagcccgtccagcgctacgccctcgataaacgaccacaccgccacactgtccggccatttgaagcgtcggcccggggtgctgtgcaaatcatgcccgaccgtaggtaagccgcgcgccatccacaagcccaccaggcaacacccggccagaatcagaaagatcggacgcggcccggcccacagcgtcagccagccgcccaggggcagcgccagcatcggccccagggcgatcaacgcccgcgagcgtccggcgcggcgtgcggcaccggcgggctccgaggtggccagcacttgggtcgacaggttcaatgcggcaaaacacaggccccacaccaggcgcaggcagagcaatgcggcaaacccggacaacatcgagttgcccaccgcacacaaggtcgcggcgccggcggcgatcatgcaggtcaggcggtcgccgttgcgtgcgtagaaattgagcacatgccggtagccgaaaatccgcaccaggcggttggcggccagcaacaccccggcctgggccagggtgataccgaacgcctgggattccatgggcagcagcaggtagagcaacacgtcactgggcaggcataaagccagggtcaaagcggcgcggcgggaatgagtatcagcggtgcggagggccaggctggacataaatctgaaacatcccgaaatattcaggtcgccacggtagcgttaatcagacctttttcccatagggcaacaaacgcagaccactggccaccgcgcccaccagtgcaaacccgcagcccagccacagcgcatagtgcgggccactgcccacggacaagtgaaaacacagggccaccagcgaagcacccagcgtctggcccaacaggcgtgaaatcgccacgatgccgctcgccccaccgctgcgggccaagggcgcgctggtcatcaacgccttgaggttgggtgactggaaaaacccgaacccggccccgcacagcgccatgcgccagccgatatcaaatgccgaggcgccgctgcccagggtggccaacgcagccatccccacgctgagcatcaacaagccgatgccgcacagcacacccagggacacacggtccgccagacgccccgcgaccagcgccatcaccgccaccaccgccggccatggcgtcatcaggaaaccggtttccacctggctgtggccgagcaccgcctgcaacaaaaacggcagtgacacaaaggccaggccctgggcgctgaaggcactcacagcagtcaaggaagacaaggcaaacaccgggcgcttgaacaggtcgagcgccagcatcggtgccgggtgcccggcctggcgccgcaacagcagcacaccgcagaccagtgccacggcaatcaggcccagcgtcagcgcaccctgggcaccgtgcaccgccgtgcccaggcccagcaccagcagggcgaacagcccggcgcacaacacggcggcaagccgatcgaaggcatgccccgtcatcggcagggtcggcaacgagcgcaagcccagccccaaggccaataaccccagtggcacgttgatcagatacaaccaatgccaggtcgccaccgacagaatcgccgacgcagccgtcggcccaagggtaaaggccaaccccaccaccaacgagttatagcccagcccgcgcccgagcatttttgacgggtagatatgccgcagcaacgccgtgttcacgctcatgatcgccgccgcacccagcccctgtgccacccgcgcagcggtcagggtgaccagcgatccggccaacccacaaaacagcgacgacacaataaacagcagcaaaccgccgaggtacacccggcgatgccccagcacatcactgagcgacgcaaacggcagcaccgtggcgataatcgccaactggtaggcattgaccacccagatcaccgaggcggaatcggtaccgatcccctcggccagggtcggcaatgccgtgttgacgatggccgtgtccagggtcgccatgccgattcccagggagatcgcgatcacggccggcaggcgtttattgaggggcaacccatcggcaacagaagacatgaacaatccgcccaggtgactaaggcggttagattaatggcagcggcgaatttattcagtggtggataggctacctgtcagtattttcatgttcgcgcccattgaaagagacctcctacattgtcccgctgcaatttttgcgagggtgacgttcctctgcccttacgagaaactcactgatggacaacgatcgtaaaaccgcgcattgcgatgcacgccggcattttctgcgcctggcggccaccagcgccggggctgtgcttctggcaggtcagttgccaatcgcctcggctcacgtggccgacacgccaaccagcattatcgacccgcagcaggcgttggcgcgattgatggagggtaacagccgctacgccgccgacgtgacaaagcgccgcgacctgatggtggagcgcgaggccttggtcagcggccagcatccgttcgcggcagtactcgcttgcgccgactcaaggattgcgcccgaatacatcttcgataccggcctgggcgaactgttttgcgtacgcgtagccggcaacttcgtgacggaaaacgggctcgccagcctcgaatacgccgttgcgatgctggggacgccattgatcctggtgttggggcatgacagctgcggcgccatttcggctggggtcaaggcggtcaaagacaacgtgaccttccccggtaaaatccagagcctggcggatgcgatcaagccttccgtgaacaaagtgctgaaagcgcccggcaacctgctcgacaacgccattgcgcaaaatgtccgggacaccgtggcacggctcaagggcgaatcaagcgtgctggccgacgcccttgcccaaggaaaactcagcattgtcggcggcacttaccgactgcgcagtggcaacgtggagttcctggcgtgatcaggtgcgccagtgcccagtcttcgccatcacccctaccgcctcggcaaaacccgcctggggcagcgtgttgagcgtgaccagccccacgcagcgtgtcggtttcagggtcgccgtgtgcgtcgccacgcgtgcgccctgctccacaccggccagcaccgcctcagggatatgcagcgcgttcatcagttccagcacatcctggccgagcgtggcgtcatcggcctcgcgcaggtacggcacgatcacccggaaaccttgcgccgccagcggcccgctgaccgccgcaaacacgctcacatccgccgccaacaagataatcgcgcggccctcctccggcccgaactgctcataacggacctccccttcatccgtgctcacctgttgcagcgcaaacgcaggggcggcgatcaccaccgacgccagcagtagaaaaccacgccgatcaaacatcactcacccccacgatcaattcactgcccagccaagcggccaggtattcacccgcctgcatgacgccggcctcttcccccaggcgctgcaccagcaattcacacagcccggcgaaactgccgtcagcctgtacgtgctgcaccgcctgaagctccagcgcatccatctgacgcagccgcgaggtgaattgccgccgccacaccagcaaaccgcccgcctgctccagcatcatcgcttgcggcgcgggcgtttcctgccacagcgccgaccagatggcctcggcattggtggtcaagtcgtggcaacgcaacgacggtgtgagctgcactaccgcggtgtcccagtccagctcggccagcgcttccagggccagcggttgcgcgtcagcggcgacaaaggcttcattcagggccgactcgatccacgccaactcatgcacatccggattgcgcgggaacacctccttcaaggtggtgtagaacccctcggggtacgcgtccagggtccaggcatggggcggatggttgtcgatgtgcgtaatgctcgcggccaggaacgcttcctctccaagccaacggcgcagggtggggaaagcctgttcgaggcagcccaccaactgggcgcggtagttgttctggtacaccgccagaccggtgtgattgctgcccagcaactctgcggattcatccgacgcggtcaccagccagctacgaaaagcctgctgaagttgcgccaggttcatcgcgctgcccccaacgtccgggccatcgacagttcctgaagcagctcggcgagcggcgggatctcatcatcgcgctcgatcatggtcgccaccggccccagccgggtcatggcctgggcgtacagttcccagacgccggtgcacaccgggctgtcatggctgtcgatcaagatgtcacggccctggctgtggccagccaggtgcacctggcgtactcgctcggcggggatgccgtcgagaaacgccagggcgtcgaaaccgtgattgctcgcactgacgaacacattgttgacgtccagcagcagctcacagccagtgcgccgggccatggccgtgatgaactcccactcggtcatggcggcaccctcgaacgccaggtaactcgacggattttcgaacagcatcgtacggcccagcacgtcctgggcctgatggatattggcgcagacccggtccagcgcttcgtcggtatagggcaccggcaataagtcatgggcattgaaaccgccactgcgcgaccagctcaggtggtcggagacaaacagcggttcaatttcatccaccagcgacttgaggcgccgcaggtaatcggtgtccagcccttcggcggtgccgatggacatggacacgccatgcagtgccaccgggtagcgctcgcgcacctggcgcaggatgtgccggggctggccgcccgcgaccatgaagttttcggagatcacttcgacaaaatccacgggcaccgaagtctccaggaagtcgcagtaatgctccttgcgcagccccaggccgtagcctgaaaagtgagggttggatgtcgacatgacggatctccgcaacgaataagtggcgagcccacacagggcccgccgggtggattacttcggttcggtcaaggtgccaccggccttgaggcactcggacggggtcttgacgatcacgccttcgcccttgcagctgttgagacccttacagtcgttcttggcggtggcacacaggctggtgcctttacaggtgttgacgccgtagcagcgcccgggtttttcctgttggtcggcggcgctggcggcgctgacgaatgaggccgaggccatggcaataagggcggcagcggcagcgaggctcaggcgggatttgagtgcagtgttcatgggtgtttctccagggttggggtgaattacttgataacggaagcagcgtcttcgatgaccttcgccacagcctcgggctgggagatgtacaccgagtggctggccttgatttcggtgaccttggaaccggcacgcttgtacatccagcgctgcaggtcggggctcagggcacggtcttcggtggagaccaccgcgtaggtcggctttttgtgccaggccgcggcccacacggtgccgccgaacagggcagtggtcgcgggcacctgggaggcggccatgaagtcggtgcggttggtggtcaggtcggcggcaaagtcggcgttgaacctggcacggtcgaagaacaggtgaccgtcgcggctctgcttgatgtcatcgctgggcgccggcatggagccgatcaactgggccatgttctcgcccacttccggttgcagcgccgacacgtagaccagcgacttgaccttgtcgcggtcgccggcaatcgagatcaccccgccaccggaactgtgacccaccagcaccaccgggccgacttgctgctccagcacttcgcgcgcctcggccacgtcggcggccaggttctcgtggccctggtgcaccaccgtgaccttgtagcccttgtgaatcaggatgtcgtgcaccacacgccagccggagccgtcgacaaacgaacctggcacgatcaccacgcttttaccggtgccgggctgcggggcatcagcggcctgggccagcatcggaacggtcagggccatggcaatggccagggaagaaagcatacgcattggaaatctccatcaaagttaagaacgtttgcccaggatcaggcggtccagcgaccaggccccaccgccatacgccagcagcggcaacagcaggcccgcccaggtcaggtgcaccggccaggcatcggggtacacaaacacctcgatcaccagagtcatgcccagcagcgcggaggcggccggacgggtcagcaggcccagcaccagcaacagcgggaacaggtgctcggcgtaggtcgccaggtgcgccgcccactccggcggaatcagcggcaaggcgtactccgagcggaacagcgtgtaggtcgacggcttgagttcaagaaacccggtgaccttggtgcgccccgacagaaagaacaccgccgcgatccccacccgggccaccagcaacagcagggcttcgggcagcaggcgctggatcacggctgctccgtgaggctgccgaagcctttaggggtcttgatctgggtgcaggtgcctttgtccaccagcacccaggcattgccctggtagtcggtggtggcggtgccagcacacgaggtgcctttgccggcggcgcagtcgttggcaccggcgagggacacgccaaagcatttttcctggggcttgggctcgtcggcgtgggccacggccgcgaaggcactgagggacagcgcaagggttgccgcgagggctgcgtaaggacgcttcataagatgagtctcctggcttgactgagtgtggccagggcgccttggaggtcggtgaccgcctgcgccagctggtgagcagagttaaagccaggcgtgtatccgctctgtgtcgcgaacgcgatagaacgtcatgcgggtgtatcagaatggtgcagggatacagttcgatacacagtcaataaaacagtgccaaaactccggcgctgtattcggcatcccgaacgacacaattagaaatattcgcctttccgaacgaaggctttttcgtgtcctcgacgaccacaaaaatcaccataaatttcatgcggttgttgtcatgtttgttacatgccaactggcatacattctgctttatccgtatttctggtaataaaatgtttcagccctgagacagtctcatcccctgaagcactacctgagacacaccataaaaacgaccacgccccaaaggagggcggcctctccgaccttttgatcgacatcaactttccaagactgctgctgcacatctgtaccccaaaaagggcgaacggcctgaacgccgataacaagcccgactataaaaaggacgatttgatgagctcgagcaagaaccacgcagtgtccttcctggatgcagaccaccccgcgccggctacccccgacagcaccctgggctttggcccctttctattactggccaagcaacatgtgttgttgcgcaacggcgaaccggtcaccctgggcagtcgcgcgctctacctgttgattgccctggtgacccgtgcgggggaactgctggagaaagccgaactgatcgccttcgcctggcccaaggtggtggtggaagaatgcaacctgcgcgcacagatcgtcgcactgcgccgggccctgggtgacgatggcaatttcagttatatcgtcaccgtgccgggccgcggctatcgttttgtcgcccccgtcaccgtactggcagccgctaaagagcacctgcccgtgccctatgtgcgaatggacgaacccaacccgccgacgccgacggcggaggtgatcggccgtgacgccttgatcgccagcctggcggaccaggtcatgagccagcgcttcgtcaccctcaccggccccggcggtatcggcaagaccaccgtggccatggccgtggcgcagcgcctggccggtgaactcaacctgggcacgtgctttgtcgacctggccccagccaccagcggccaatgggtggccggcatgctcgccagcgcattgggtatccagaccgtcagcgcagacccactgcactgtgtggtcgccagcctggccaaccgccgcttgctgctggtgctcgacaattgcgaacacgtactgccggccaccgccgacgcggtggaaaccctgctgcgcggcgccccgcaatgctgtgtgctgaccaccagccgcgaaccgctgcgtgcaaacggtgaacgggtgcacgacctggcgccgctggaggtgcccgacgcacacgcccacctcagcgcccagcaagccctggcctggtccggcgtgcgtctgtttgtggaacgcgtccgcgccctcgacccgagttttgtgttccacgacgccgacgtcgcggccgtcagtgcgatctgccgcaaactcgacagcaacgcgctggcgatcgaaatcgccgccgctcgtgtgcgcacctttggcgtccaggacctggtgggcctgctcgacggcagtttccgcctgcaaatgaccggccggcgtaccgccctcgcccggcaccgttccctgagcgcgaccctggactggacctacgccatgctcagtgacgacgaacaggccatgctgcgccagctcgcggtgttcaccggttccttcaccctggaggccgtcaaggcgatgactaccagcagccgcctggccccgcgcaacgccctgcccttgctcgaaagcctgatggacaagtcgctgctgatcgccagcgaatccaccgtgcccaagcgctaccgcctgctggaaaccacccgcgcctacgccttggaaaaactcaacgaacagggcgaaacccgcgccacctgccaacgtcacgcgcgctatgccctcggtatgttgcgcgaagccgggcgaaccctggatggcctgtcgccgggcacctggcttgccctctacgctgcggagatcaacaccattcgggccgccctcgaatgggcttactcgcccaccggcgacctgcccctgggcatcgagttgaccttgggcggcgtgccgttgtggctacgggtgtcgctggtcagcgagtgccgcagttgggtcgatagaggcctggccagcgacgccctcgtcccgctgcccttgcgccagcgcatgttgttgcagaccgccctggccagtgtgctgatgctcacctacggcaccggcggcccgatgcgcgaagcctggcgccaggtgtgcgaagacgcccgcgacctcggcgatgccgagcacaagctgcgcgccctgtggggcctgtggaccgaccgttgcggctgcaaccagtacaccgaagccctggaacttgccgagcgctatatcgcgctgaacagcagcggcagccaacaattgctcggcaaacgcatgcgcgccgtggcgctgttccacatgggcgacctgatgggtgcacggcagaacatcgatgaagccctgggctcgccgtcggcaccgcgctcgcacatcatcgacctgcacttcgaccaacgcatcgccgcccgttgcctcaaggccaaggtgcagctgcttgaaggcgacgtcgacccggcgctgcgcctgatcggcaactgcgtcgacgaagccatctccctcgaacaccccgcgaccctctggtacaccctgtgcctgggcgccatacccctggccctgctggcgtccaacctgccgaaagtgcgctattacctgggcctgttgcaagacagcaccaccggccaggacctgcacatttggcggcaatttcgcctgtgtttcgaaagtatcctgctgatccgcgaaggcgcgccggaaaccggcgtgccgcaactgggcgaagccttgcaccacctgcaaggccagggcgacagccagctgtacagcctgctgcgctgtgaatacgccctgggcctggcgcgcctgggcctggaaaaactcgccctggaagtgctggaagacaccctgcaattggccctcggccgccatgaacgctggttcgtgccgcaaatgctgcggatcaaggcacaactgaccttgcgccaggcgcactatggctcggtggacaaggccaccgtgctgctgcgccaggcgtgggtcgacgcgcagttggcgggcgcgcacttctggcgggcgcagatcgcgaccgacctggcgcgcctgcaagaacccaagctgcgcatcgcctccctgccgcgcttccagcaccgataaagtggcgagcagacttcctgtggcgagcgggcttgccccgcgctggggcgcgaagcgcccctaaaaccaggcgacccgtttccggctggagatatgcggtgactgggtttgagggtcagataaggcgagcagccaccagccagtccgccacggcctggaatgaagcatccggcaccggatcccccggcacggtcctgcgcgcgatctcagccgccaggcccttgtccggcgcatggggaatccccaggtcatacgcctcctgcagcatcaacaacgcctcctccggcgaagcccggcacacgatcaccggcaccggggtttccccgcgtacataacgcacgccaatcacccagccgtcggtggtgccgatcatcaaggacgcacggcccaagcccagcttagtcgccagggcctgcatctcattgcgctggcggcggcgttcgcttttgatcagcgggtcgccgtcgatgtccttgcgttcgcgcttggtctcactgcgggtcatcttcatgtcgcggccgaacagccagcgttgcatcatcacgtccacgccgcccaccaggatgaacgcgcacagcacggtgaacaccagcggcttgagcaccaggaaaaacgtcgaatccatgcactcggcaccgcagcgcgacgactccatcagcgcctgcaacgcatgcttgccgaccacgtagaacgcgattgccagcacgtgcaccttgatcaggcccttgatgaattccaccaggttgcgcagggcaaagatcttcttcatgccctccgccgggttgatgcgtttgaactcgggtttgatcgggtcggtcgagaacacaaagccgcgcatggtgatgatattggtcaggatcaccaccccagtggtcaccgccatcaccggcaaggtgatgccgatcaccagttgttcggcgtggtcgagcaccctgggccacacggtggcgaacggttcgatgtagatctgcgcggtgaggtcgatcagcgccgcgacctgggccttggcccgtggcgccagaatggaaatgcacagcgtacagaacaggatgaccatgcccgacaccaggtcctggctcttggcgacctggccctttttacgtgcgtcctggagcttcttgtccgtggccggctgggatttttcttcgctggtatcggccatgggctactccatgccggccagggtcttgagcagttcgacggtgccgcgaaactccgctagttggtcaagcatcagcgggatcaggaagccgatgtagatcaccatcaggatcgtgaaaaacaggtttttcaccggcagcgacaggtcgaagatatgcaggttcggcgccatgcgcgacaggtaggcgagcatcaggtcggtcaccagcagtgcgatcaacagcggcgagaccatcagcaccccgacgcgcatgatctggtcaaggatcgacaacaccgccagcagcgccgagctggcgaacaccggcgtgaacgaggtgaccggccagagctggtagctgtggtaatagccgtcgaccatcagaatgaaaccgccggacatgaagaacagcgtgatcagcatcaccgtgagcagggtcgccatcacgctggactccccggacgacaacgggtccaccagttgcgccatggtcgagccgcgttgcaggtcgatcaactcccccgccacctcggcggcccagaacggaatgccgaacagcaggccgatcaaaatgccaatcaggaattccttgatcagcaacccggcgataaacaggctgccgtgctccggcatcgaggtcagcgcgtcgaacaccgggaagaacatcgggatggaaatcgccacggccacacagccgcgaatcatgccggtgagccccaaccggttgaacgccggggtgatcaccaccacacccatggcacggcaggcggccagcgacgcggagctgatcaccgggtaggcgacttcgaggaactgcgcggtcaggctggcatccatgggcggtcagcgcgtccacatcgggaaattatccagcacctgaccaccgagttccgcgacttgtccggcgagaaccggaccgaggaacacgatggtcagcaacaccgccaccagcttcaccacctggggcaacgtctggtcctggatctgcgtcagcgcctggaacaggcccacgctcaaccccacgataatcgccacccccagtgccggcgcggagagcatcagcaccgtcatcagcgcctgtttcatcaatgacaggaatacgtcctggcccatgggtcgtgcctcagccgtaactcagaatcaaaccgtgcatcaagcgcgaccagccgctcagggacacgaataaaaagatcttcagcggaatggagatcaggttcggcgagaccatcgacatgcccatggccatcagcacgttggacaccagcaagtccaccaccaggaacgggatatagagcaaaaagccgatctcgaaggcgcgggtcagttccgagctgacgaacgccgggatcagcaccaccaagtcatcgtcacgcaggtcagtgcgtgcctcaggcgaccagatggtctcggtggcctgcacgaaaaaaccgcgttcggactcattggcgaagcgcttgaggtgcgcctgcaacggcggacgcaatgcgtcgcccaaatccttgagttgctccacatgctcgatgttgaggtcgcgcccctccacctgtcggtacatgtcgccaatcaacggggtggtcacgtacaccgacaggatcagcgcaatgccgtacagcaccaggttcggcggcgtctgttgcacgccaagggcgttgcggatcaggaacagcaccaccgagatcttcatgaacccggtgagtgtcaccaccgccagcgggatcagcccgatcgtcgcaacgaccaggatgatctcgatcaggttcggctgatagccggtcatggggtggcaaaactcagcaggcgcacccccaggccgtcaccgattttcaccagttggccctggccgacgcggcggccgttgaccatcaggtcgacgctgtccacgcccggcgtgttgagctgcaacaggctgccggcgcccagttcacgcaattgcgccagggtcagttccaggctgcccacctggcacaccagtttcaacagcaggtcatccagcgcaacggcggcatcaacatcggtcatggcgttctccggttcggcaaagggggcttgcaaggcttcctgcaggcgcaggacttcgccctggtattggcagcgcgcctgcaggcggccgtcgaggtcgagcaaaaggcccgggcctggttccagcatcagcacatcgccggggcgcaggctgcgcagttcgccgaggctcagccactggcgccccgccaccaccgccagggtctggcacaggcctggcaaggggtcgggttcgacctcggcgtattgcgccagcaactgcgcaaccagcaccgcggcgctttcgctcaggtccagctgggcgctcatcgcgggttggttgccgaaggtcaattccagcgccaaccgcagggcaaacacgccctgctcatcagcggtttcgagcacctgcaccgggtgaccgagcaacggttccaaggcttcgatcaggtcgagcagcgccagctccagcaacaacgcgcgcggcagcgcaggcaacggctgcacatcgaacggcagcgccagcggcagcgtcagttgctccagcgccgcagcagacagacgcaggcgcaccggggcacggcccagcgacagcaacacgtcacgcggcgcatcaaggctgtgcactgcggcggcccagctcacgcgcaggtcctgcccagcgcaacggccctgccaggggcggcgacggcgatgcagttggttgtgcagggccagcaatgccgggtcgtagtgggtcagccacggcgacagcgggtcggcaagggctgcgatcatatgccggtgccctcatcacgcaactcgccaacgcgacgctcatcgctttcgcggccttcgagcaggctttgccaggcgtcggactgacgctggcgactcagtcgctcctgacggaacagatcgcgttcgcgctcctggctttccaaggtgatggagacgtggctcacatcgttttccagttgctgctggtcatccgacaggccgcgcaagcgatcctgggcggcctgccaactggcgaccgacaggccttcggtcagggacgcataaacctgccgcgcttcctcggcaatcgcctcacggtgcaggcgcaattgctccttggcgtcggtcagcacaccgtgggtctgctcgcagcgttgctgctgcgcggccagttggctggcggcgcgttgttcgcgcaacacccgcagggtttgcagggtacgtagttgttcggttttcattgggctgtctccatgttcatgccgatacacacatcggtggtgagcctgcttgttgtggcgagcaggcttgtcctgcgttggggtgcggagcagccccttgtaaactcaccaggctcttccagataaaactcagcgcctggttttggggctgctgcgcagcccaacgcggggcaagcccgctcaccacaacaggcctacccagcacaacaggcccgctcaccacagcaagcccgctgactacaacaggcctgctcaccaccacaagtcggttcatgccaacacctggcgcatgcggttcagggtttgttccaggttgctcggctcatccgcgttctgacgcaggaaggcttcgatagcggcgtggcggttgatcgcttcatcggccaggggatcgctgccggcggagtactcccccacgcggatcagcatttcgatctcgccataccgcgccatcaattcacgcatgcgcatggccagtcgcttgtgttcttcaccggcgacctgctccatcaaacggctgcgactgcgcaacacatccaccgccggaaagtagttgcgctgggccaactcggcactcaacgcgatatgcccgtcgaggatcgaacgggcctcttcggccaccggatcactggcggcatcaccctcggtcagcacggtgtacagcgcggtaatgctgccgctggggccggggccggcgcgttccagcaaacgcggcaaggccgagaagaacgacggcggataaccgcgccgggtcggcggctcgcccacggccaggccgatctcgcgctgggcacgggcgaaacgtgtgaggctgtccatcaacagcaatacgttgcggccctggtcgcggtggtactcggccagggtggtagcgacaaacgccgcacgcacccgttcggcggccgggcggtccgacgtggcgaccaccgccaccgtgcgcgcacgcgcctgggcgtcaagctgcacatcgagcaattcgcgcacttcgcggccacgctcgccgatcaggccgatcacgatcacatcggcttcactgttgcggatgatgctggcgagcagcgacgacttgcccacaccgggctcaccgaagatgcccatgcgttggccctgggccagggtcagcaggccatcgatggagcgaatgcccaatgccatggagcgcacgatcagctgccgcgaaaacgctgccggcggttcagcgtgcagcgggtaatgctgcaacgctacggtcggcggaacgccgtcgccgtcgaggaaatcgcccatggggctgatgacccggccgagctgcgcatccccgacggccacgcccagggtttcgccggtggcggtgatttgggtgcgcgtggacaggccttccatggagccgatgggcgacaggatggcttcgtcgccgtcaaaaccgatcacctcggcgctcaggctgcgcgcgctgccggggtcgcgcagctggcacagttcaccgatgctcgccccggccacgctggcgcgcagcaatacaccgcgaatactcagcacggtgccgtgcatgggtcgcgggcgcgcctgggccaggcgttcggtgaggcgtggcagcaggtgttccaggttcatgccacgccctcttcggcgaagggcaacaagctgcgacgcaggttctgcaattgggcttcaaggcccagttccacagagccggccgggctgttcaggcgggcctggccggcgctcagctgttcatccgcatccactgcaatcgccagcccctccaacttgaggcgttggcgcaaggcatccacgtccgccggcggcacccacagggtcagggcctggtcctggcgaaacgcgctcaacgcctggcgggtactgcgcactacgcggtcggccgtgtccaactcacccagcacttcgcgcacgatacccagggccaggtcgaccagggacgtttccagactgctcaagtaatgctgcacctgggcttgggtagcgagcagcagttgcgccacctgttcagcaccggcttgccgggcgctttcgaaaccctctgcgcgggcgctgctcagccattgctcgctgtcggcgcggatctgctcggcctgcgccttggccgcctgcaggaaggcaaaaccatcgctccatagcgcggcgtcttcggcgcgcaggatgcgggcggtggggcggcttggcaattcagtcatggcgtgatctcctcggccagcaggcacgcggcggcggcctggacgatttccaggtcgcgtggcacacgggcgctgtggccctgggggaaggcaaagcgcaaacgcagccagccctgccagtcggcatgctgggcgtgcaaccaggccgcgacgcaaccttggccatcgcggtcgatggcgtcgaccaactcggccggctcgcgcagcagatccgccgcgccaccgagttggcgcaaggccagggcgctcacgaagacttcagcgcccaggccttcgcgcaattcattgaccacttcgcgacggatctcgcggctcagggtcggggcatgccagatggcgccgcacaaccttggcaagcgggcaaactgtgtcggcgacagcaacagcaccgccaagtctgccgccattggcgtggtcaattgcgccatgggcgccagttgatactggctgaccagcaactgctccaggcgctggcgaaagcgtggctggccctgcatcgcctgcagcacggcgtctggcaattcatcggcaaaacatgcacccaggctcggcccgcgcacaaaccgcagcggctcggcaatcagcccctgccagcgttcgaacaaactcattcaccctccttgagcacatacaacgcctgggactgacgacgtgcccactgctgacgggcgagcacacccaccgcaccgagtgcgatcagcaacaaggcgccgaacatcagccgcgcctgggccaggttgtcttccagcagccacaggcccatgaaccgcgccaggcgcggctgcgccgggttctgactgatggcgacggcggccttgatcgcggtcaccgaaacgccgtcgtaactcaacccggagatgccgttggcgaccagcgtcttgatctgcgggatcagcgtattgatatcggtgtccgggtcgtaacgcaccagcaccgaggccgacgatggtgaaatcacgcgcttgagcaggtcattgtccggcagcaccacgtgcacgcgggcggcgacgatgccgtcgatctgcgacaccgagtgcgacagctcttcgctgagcgcatagatcatctgcgcccgctcctgcaccggcgacgacaccaggccgttgcccttgaacacttcgcccatgttggaaaagctctgctgcggcaggccggcgttgtcaagcagggtcatggcttcggcaaagcgtgactcatccaccaccaccttgagctggccgttgtcctgggccttgcgttcggccgggacgccaccgcgcagcagtaccgcgaccatggcattggcgtcgcgctcgctgaggttggtgtagaggtcggtgttgcacgcctgcaacaggctggcgagcaggccgatcagcaacaggcgcagggcgcggtttgggcttggcatacggttattgacccttgagcagcgtgttggcggaaccggaaatctgtgtcgcaccgcgcaccaccatctgggtttcgatggagtaatcgaacatcttgcccagggagtgaacgatctggtcgacctgttgctcgccgacttttttccccggttcaccctggggcgaagcactggcggtgcggatttctgcctgggccggcggcggtgccgaaggattgttggtgagcaggtcggcccgttcggagaaagcccgcgtacggtcgatgaaactgttcatgcgctccatcaggcccgagccgatctggtgcgggctggcgccttcgggcatgcccttggcggtgttggccatgtgctcgaacaggttctgcgaggccccggcgggccccgcgccggcagacggcggcaacgccgaagcaccggcagcgagactgatagtcataggggtttcctactcttcgtcgtcatcggacatggcgtcgttcagcagttcctgcatcttcggcatgatgatgaactggccgccataggtgaccgcctgggtgatgaacgaatcggtgagttcggcgtcggtgggctcgttaggtttatcggcggtcttggcgttttccaccgccgcattgaacttggcttcagggctggcgccaccaggggtgggattgctgtctacggccgttacggacatggtgctgctcctttactgggttggggtttcggtactgacttgcgcgccacggaacacccgcaccccgcgctcgcgcgccaccggggcggcggcgaccttgggttgcaggtgatccacatgctgctgcaccagcgccaggtacggcggtggtccggacacgaacacttcatcgccctcggggccgttgcgcatcgacaactgctggccgaacacatcgaggttgttgaggtaggcctgcaactggtcgaggtccagggcgttggccttgaagagcttggtgctgatttcatcgctggcgttgaggtacaagaggttgccgtcgaagtaccaggtgaggccgttggtgctgcacagggtttgcaggaactccccggcggtggccgcgcgaatcgtgctgcgagccttgccgcggaccttgtcggagagcaccagcggcacatcgaggttatgcccgaattcttccagggcactgcgtacatcctggtccaccagtacgtaggcgtacggctgggagaaccaggcaggttcttcggcagcgtgggcgaaactggcgctgaacaggcataggacagccatcaaaaatatgcttacatggcctccgccttcgccagacgagttgtgacgatgacccctagatttctgctcgccagtaccctgctgctggccgcctgcgcccaccagcctgcgaccgatgccgacaagtccctgcaactggccaacgacctgagcaagcgcggcgactacgccagtgcggcagcgctgtacgagcgggcggcgcagcaacccggcgcgggtatcgagctgtggctcaagctcggccaggccaagctcgacgccaaggatgcggcgggcgccgagcgtgcgttccagcaggccctggggttcgatgcgcgcaatgccgaggccctgctcggcctgggcaccgcgcaattgcaagtgggcaagacccagcgcgccgccaccgccctgggccaggcggccgagatcagcggcttgccggttgcctacacccgcctgggtgtcgcgcagatcctcaatggccaggccgctgcggcgcaaaccgcgttcgccaagagcctgagcctcaagcccgacgacctcgacaaccgctgcaacctggccctggcgtatgcgctgggtgggcagtcgcagcaggcgctggacaccatcacccccgtcgcccagtcgccccgcgcattggcgcggcatcagcgtaatgagttgttggtgatggtattggcggggtacgaaggccgcgtcgctgcgctgccgttggacgatattcccgcagccgagcgggcgcggttggtggatgaagccaagcggatcagggcgatcagtgatcccgtggcgcaggctcgggagttggggttggtggatccgcgctgaatctgctgcagatgacttttctgtggcgagcaggcctgttgtggtgagcaggcttgccccgcgttggggcgcgaagcggcccctgtcaaattcaccgcattccaacagacagttctcagcgcctggttttggggctgcttcgcagcccaacgcggggcaagcccgctcaccacaggaagcccgctcgccacaacaggcccgctcaccagtataggcctgctccccacagcaagcccgctcgccacagcaaggaacacaggtcattgcttgccccctgacgcatcagccttggcttcctgctggtccttgcgacgctgcaattgctcgcggtcgaacccttcgatgtacacctgggcagcgcggcctacgggcgcggccatggccgggccggtggcgcggccttgggtcaggtcctgcttgcgctcgaccatttgcatcaggttcaaattgttcgcacagccaagcgccaacgtcggtttgaaatcctcacccaacccgacggtgtccgtcgccgggggttgctggcactgggtcggcaagccatcggcgcggtattcggacgagtaatacgtcggcgccaggtgggtctggcaacccatcagcgccaggggcaacagcagcaacacacgtaaaacagtcatggcaggccccttgatcaattcatgtagaaaccgaacgccccgccgctgcgcggtccggtggccgctgcggtagccggtggtgcgtcgaggggcgtggcgaggttgcgaccgcgcaccggctccaccaggtacggcgtaatcaggatcaccagttcggtttcattgcgctggaagcgcttggagcggaacaggttgccgaggatcggcaggtcgcccagcagtggcagtttctcgatgtcctggctgctttggcgctggaacaggccggcgatggcgaaagtctgcccgctgccgacttccacccgggtatcggcacgacgcacgctgaaggacggcacatggaaatggccgaaatccacggtgccgccgctgaccacctggctgacttccgggcgcacttgcaaggctatgcggccgttgggcagcagggtcgggttgaacaacagcgacacgccgaacgacttgtattcgatgcccaccaggtcgcggttgaccggcaccggtatcgccacttcgccaccggcgaggaagctggcggtctggccggtcatggcggtgatgttcggctcggcgagaatctgcagcacgccgttggcctgcaaggcgtcgagcatgccgtcgatattcacattgccggagcctgcgcctgcagcggccaagccccccgccgacgctgctgccaacgggccaccggtgatcaggccgaacgagaacgtgccgttgttgaacatcgcattccagttcacgccgtagtgcagcaactccgaacgcgacacctcggcaaagcgcacccgcaggttcacctgggcggagcctgcatattcagtggtgttgatcgcgctctggaaaccctgcccctggggattgagcagcgcgttcaggtctgtggcttccgccaccgagcctacggtgcctttggcgatcagacggttaccggcaccgctgatctgcgcagcgttgccgggatgcaatgcctgcatcggcgccgtcaccgcctggctggcgctgctgacggccagactcaggttcgccagttgcttaccgtcactgccgagggcgatcaggctggtgttgcccggcgccttgccgaagatgtagatcgtgcccggtgacaccacctgcaagtcggccacattcggttcggccaccagcaccgtgtccacgggagcgacaaaatgcaggatgcgcccttcaccggaggccagggcgatagagccaccggcgccggcggcgatttcctgagcctggctcacgcacgaaaaaacactcagcaacaatacacaaaaacgcatcatgaggcagacgccagggcagtgacggaagccgcggcaggcgcgcggcgattggaaatctcggtcaggctgatggtcaccagcgcttgcaagttgtactcggtggccagctcgcggaacgacagcaccgccagttccagctcgccgcgcaccaccaggcgacgcaggctgcggcgcagttccgggtgcaccagcaacaccgcgctgttgacctcgcgggtgtgctcgcaggcctggcgcagttgggtgagcaaggcgcggctgacgtcctcggggatcaactcgcgctgcggttcctggcgacgcagggcgccgcgcaactggtcttccaggcccggcgccagcaccagcgcaccgatcacccggttgcggtcggcgtactgatggctgatctgccgggccaacgcggcgcgcaggtgttcggccaggcgcccggcatcggtttcacgggcgccccactccaccatggcttcgagcaaggcacgctggttgcggatcgacacaccttcgccgaccagcaaacgcagggtttctgcgacccgttgcaacggcaccaggcgcagggcttccttgaccagttcgccgtaggtggcctcggtgcgctccagcagcaggcgggtttcctggatgccgaggaagtcggcagcgtagcggcgcaggctgcgttccagcacaccgcgcaacacctcgtcgggcagcaggaaaccgatgccggcgttgcgcaacgtgtcttcgtgctggcgctcgacccagtgggcgttgcggcccgtgagcggcgagtcggcctgcaccgtggcgaggtcgagcaactgcacgtgcaccgggtcgtcctgcaccagcaggcagttgatcggcaactcgccttcgctgaccggcacgccttccagggacacgcggaaactgcccggtgtagccttggcctccatgtagatgcctggtaccggtacgtcgacgccgagttcggtgcgcaagtcgtggcacagcgcttcgacgcgttggcgcagcagttggcgcggcgcgctttgggacacgccgctgccgatggtcagcagcacgcgggcgtcgggcagcaggttgtcatccagttcggcctggacttcgaccaccggctccggcgtctcgaccaacacttcaagttccggctggcggtgatgccggcgatacatcatgaacgccgcaccgccgaacaccagggacaagccgaggaacacccaggtcggaaaccccggcaacaggctcacgccgatcatgatcaacgcggtcaaccccagtgcacggtagctggcgcccagttgcttgatgatctcgctgcccaggtcccccgcttcaccgtcgctgttgacacgggtgaccacggtgcccgccgccaccgaaatcagcagcgccgggatctgtgcgatcaggccgtcgcccacggtgagcaacgagtaggtgtgcaccgcgacgccgaacggcatgtcgcgctcgatcatgccgatcagcatgccgcccagcaggttgaccgccaggatcaccaggccggcgatggcatcgcccttcacgaatttcatggcgccgtccatcgcgccgaacatctggctttcgcgctccaggcgtgaacgccggcgccgggcttcggcctggtcgatatcgccgttgcgcaagtcgttgtcgatgctcatctgcttgcccggcatcgcgtccagggtgaagcgcgcggccacttccgctacgcgctcggcgcccttggtgatcaccacgaactgcgccacggtgatgatcaggaacaccaccatgcccaccaccacttgcccggcgatcacaaagtcgccgaaggccttgacgatatgcccggcatcgccgtgcagcaggatcaagcgcgtggtggtgatcgacagcgacaggcgaaacagcgtgctgagcaggatcagcggcggaagcgcggagaactccaccgaatggccgatgtagaacgccacgatcaggatcaggatgctcagggcgatattgaggccgatcagcgcgtccaccaggtaggtgggcagcgggatgatcatcatcacaatcgccatcagcatgaacgcgacgatgatcacgtcggtacgctgcgcagccaggcgcgccaggttgttcaggcggttgagtgcactcatgcgccggccctgcgtgcggccaggtagcgtttgaagcactggcgcgcgtcgtccttgcgttcgccgtaccacaaggcgcgggcgcgcagcagcaacaggctggcggactcgccttccagcgccaccagacggtcgagggcgccgagggcgcgagtcgcgtcgccgctgtcggtgaaggccagcaccagcgagcgcagcaacgcgccgtcatcgggagcgacgttgaccgcgatcagcagcatcaccagggcgcgttgggactggccattgcgccggtacagctcgccgatgcccttgagcagttgcacggcgtcgtcgttatcgcgagccatcaggcatgtacctccgagcgttgctgtgcgagggtgcggcgcatctcgatttcttcaccgatcagctcgacggccagttgcttgatgtgtggctcggtgtccaggctgggcaggatgtgttccatcacatgctccagcagctccagggaacgggcgctgccgaacagcagcgagtcgacgccggcggcgctggtgagttcttcgaggtcactgcgcagggagcggcgagtctgggtcttgcgggtcttgagcaccgcttcgaaagcggtggcctggcgcgaattgaccgggcgcacggcttcgaccggggcgctgcgtacgtcactggggatcaacgggcggggttcgactttcatcccagggccttagcttaaaagcatggtcacaacgtgaaggtgaagcgctcctcgccacgggcgaggatcacttggttgttttcgatgcgttccagcacccagttgtccgccagtgccgcgccggggtacaggcgcttgccgctgtcgttgatcacatagggatgagggccgaaccacacggcctggaagcgcacgcgcggcgccgccgcatcggcccgcgcggtgacacgcgggttgagcacgatctgctggccgtaacgctggtcgaaggctcgctgcaccgccagccactgcagtttttgcgactgttcgaaggtgccggtggcgctgagctggccgttgctgttactgactttcaccgtgtccagctgggcggcttgcagctgctgctccagccaggccttggcctgctcgcgggaaggttttttcagcggcgcaacgtcggccacggcggttgtcggcagcagcggtgcttcactgcgaaacgccagcgctccagcacagataaacagcagtgcggtcgcgacgatccagggggtcaatttgcgtggcgcgggcacgggtttttcagcaccgcccggcattgccaggctcacccccgccgtgccgatgcgcagctgcaccggcagccgcgcgcgatgaccgttgccttggggaatgcgcacattgccggcgatcaatacgtcaccgcccaaggcttcgaccgccacctggccgccttcaaaacgcaggcgcaggtgcaggccggcaatgccgggatcgctgagcaccagatcagccgccagatcggcgccaatggtgtagacaggctggtcgagcaccagggaactgccctgatgcaaaccgccggtcaccgtcagggtcggcgcgccagttgcggcgaacggacccagggaaatcagggctgtcatagtcgggtttgcccccttgagcctgtgcaacggggtcaagaatcaggataaaaacgggacttgaggggtaaacgggcagcgccggcgctgcccgtttggcgaatcagttctgcggacgctgtttggtggcgtccagctccgcttttttcgcggtgctgatttcggtgatcttggccgacttctcgatagccatgttgaaggtcgcttccatcttcgcgatagcgtcgtcggcgccgccggcttttactggtgggacatcagccatgttcatctccttgcatcgatagggaagttattcagttgcgcaacagcacgctgaaagtatgcaaaccggtgaaggcccaaaacgtcagacagtgaaccttcgaatcgccgttggtttgcatggaatccatactactcacgatcaaaacgccttcgctgtgaaagcttgtgaaacgtttcagacaggcactgtgaaaggtgtagctcaacctggcattgaaaaaaactcatcgccggagcggcatggaacttttagcagaaaccaaaaacacgccacaggccccgatttacggggactcacctactgtttacagaacgaagctgaacaataaacctcgatggagacgcccggcacagcgctgctcggcaattattttcgcgacaacgtcacatttttcgctaatagccttttgcccaacttccagggtatttcgatttgtaacaacagcgacttaatcatcgcgtttgataggcctcccccaacaacctaattgcggggggagcaactttccgccgtgcctgttagtgcaactgcactaataaccaaaggacgcgtttgcaggccggctatatatgaaccttccaggtgatctatgaccgacatgaattattcacccccaactttccttgaagacgacggttgcgttgagattcacttcggcccttatcgactgctgcccaagcgccaccaactgctcaggcatggccagccggtaaaccttggcagccgcgccctgaccctgctgatcgccctggcctcgcggcccggtgaattgctgcagaaaaccgaactgctggacatcgcctggccgaaactggtggtggaggaatgcaacctgcgcacgcagatcaagacgctgcgccgcacactgggcgatgacgatgtgccgtacatcgccacggcagcgggcatgggctatcgttttgtcgcgcccacctggttcgagcgggcggcgcacccgcgggcgatgaggccgtcgggtggtggcggtgaacgtgtggcgggcggcttggtttagctcagggcgctcaggtccagatgcccatccttgatcggcgggcaccagtagtaaccaccggtcaagggggtgctgatgcggtacagaccatcgacaatcccatcctccaacccgctcatgcggcgcagttgcgcttcgaacgcatcgaaggaatgcccgaacgcgaggaacatcaaccctgcctggccattctcggcccatggcatggagcgacgtaccacgaaggcttccggcgtgaagctttcctgggcggtgcgcttggtgtgggcggactcgggagcgtcgtcgagttcttcgttgtcgccgtggcggcgaccgatgatgtggtcgcgctcctgagccggcagcgcagcgaagccatcgaggtcatgctgccattgctggagcgcggcaaagctggcgccgctgtcggtcagggcggcttcaaccgcggcgtcgtcgtgggggttttcggtgccgtcttcgtagtcggtgaggtcgaagccggtcttgtagcggaaaccttcggtcatctgcaccaggcgaaatgccggggccagggccttttcaaaggcacggctgcgcaatagcaattcaccgcgatcctcgccatgcagccacacccacagagcttgctgagtggacggattgtgtgcgcccggcccgctgactgccggaaaactgcgcaagccttcaacgcgtgtgcccagtgcggtgaccaacggctcgcccagaccgaccactgccgccgagtcgaccagttgcaccagcgcgtccagcgcagcaggcacggcggccagggcctccacggcaaaaaacagatggcgtgcctgcaacggcaccggtgcggcaagaatgcccggctggtactgactcatgtgaactccttctgaaaagccgcgcagtttaaccgccgggctcagccatgcgtactagaaagcgcgcaagccttgccatagagcctgttgttgggtgactctctagtcatgttttgcaactattccaggggtagcgccatgaccaccagcaacctgctcgctcagctgtttcccgcctccgccgccgcagttcccaagcaattccagctcggagcgcccattgaacagcgtgattacctggtcgacggccagttgcaggtgtggaacggccccttggccaaggtacaaagcccggtgcagtttggcgacgagcgcgtgcatatcggcagcacaccgctgctggacgccgagaccgcccttaccgcactggatgctgccgtgcgtgcctatgaccggggccagggtgaatggccgacaatgcgcgtggccgagcgcatccagcatgtcgaagcgttcctgcggcgcatgcgtgaacaacgcgacgcagtggtcaagctgctgatgtgggagatcggcaagaacctcaaggactcgcagaaagaattcgaccgcacctgcgactacatcaccgacaccatcaacgcgctcaaggaactcgaccgtcgctccagccgcttcgagctggagcaggacacccttggccagatccgccgcgtaccgctgggcgtggcgctgtgcatgggcccctacaactacccgctgaatgaaaccttcaccacgctgatcccggcccttatcatgggcaacaccgtggtgttcaagccggccaagcttggcgtgctgctgatccgtccgttgctggaggcgttccgcgacagcttcccggccggggtaatcaacgtgatctacggcagcggccgcgaaaccgtcagtgcgctgatggccagcggcaagatcgatatctttgcgttcatcggcaccaacaaggccgccagcgacctgaaaaaactgcacccgaaaccgcaccgcctgcgcgcggcattgggcctggatgcaaaaaaccccggtatcgtgctgcccgaggtggacctggacaatgcggtcagcgaagcgctcaccggctcgttgtcgttcaacggccagcgctgcaccgcgctgaaaatcctcttcgtgcatgaagacgtggtcgaccgctttatcgagaaattcaaccagaagctgaccacgcttaaacctggcatgccgtgggaagacggcgtggcgctgacgccattgcctgaaatgggcaaggtggattacctcaacggcctggtggccgatgccgcgcaacacggcgccaaggtggtgaatgaggatggcggtgaaagccgtggttcgttcttctacccggcggtgctgtacccggtgaacccgcagatgcgcgtgtaccacgaggaacagttcggcccggtggtgccgatcgtgccgtaccgcgacctggagacggtgatcgactacgtgctggactcggacttcggccagcaactgagcctcttcggcaccaacgccgtggaagtcggacgcctggtggacaccttcgccaaccaagtcggccgcatcaatatcaacgcccagtgccagcgcggcccggacaccttcccgttcaacggccgcaagaactcggccgagggcacgctgtcggtgcatgacgcgttgcgcgtgttctcgatccgcaccctggtggcgaccaagttccaggagagcaacaaggcgctggtcagtgacatattgcgcaaccgcgattcaagtttcttgaccaccgattacattttctgaaaacgacacacccaaatgtgggaggggcatgcccccttccacatttgggccgcgtaaccctgaatttcgaggccactttactaccgatgaacctgcccttcttcgcccggcgcctgttgcgcccgttgctcgacccgtatcgccgctaccgccatgccaagctgatccatgccgtgcgggtctccatcggcttgctggcaacgatcctgctgactaccggcatcaacctgccccacggtgagtgggcgtcggtgaccatgctgatcgtgatcggtggcttgcagcaccacggcaatattggcaagaaagccgtggaacgcgcctacggcaccttgatcggcgccagcgtcggcttgttgctggtggtgcagcaggcctacttcggccagcccttcctgacctacctgttgatgtcggcggtgtgcgggttcttttcctatcacgccatcggcaagggcggctacatcgccctgttgtcggcgatcacggtgtttatcgtcgcaggccacggggacaacccgatctccgatgggctatggcgcaccgtggacatcctgatcggcattgtgctggccttggcgttctcgttcgccctgccgctgtatgccgtgtactcgtggcgctacaacctggccagtgcgttgcgcgattgtgcggcgatctacagccggatcatcaatggccagtcggtcaccgatgacgagcacctcaaattgctcaatcgcttgaacgcggcgatgctgcaactgcgttcgttgatgccgtcggtgtccaaggaagtgcggatttccatgaccgagctggacgcgatccagcggcatttgcgcatgtgcatcagcaccctggagattcttggcaatacccggcccgatccacgagatgaacaggcgatggcgcggatgcaggtgatgttgagggccgaacatcggcaaattcgggtgcagttggtggggatggcgcgggcgttgaagtcgggggtgacggagcggttggagcggcccagccctatcacgggcaccgagccagcactggatgcgccagtctacagcgcgctggatggctatcggttgttgacggtacaactggcggcaaacgtggatgcgatgcgccaacgcctggccaaaagtgccgggcactggaagatctagagaggtggcctgttgccgtgtttaccaacgtcaacactttcacactttctcttacatatttttcacgttttattcacatcccggaacgtagggtgaagcctcatccgttacaaatgttgcatatcaagcccgccgccccagcgggcttttttttgcctcggatttgacctagcgggacgccttgacggcgggggctgtcgcttgttcgcgaatggcccgctgggtatccagtaccttggccaatgcggtttccgcttccgggctttgctgtggcacacgaatcgccgccgacaccagggtgatcaacttggccatcacctcggcatccgtcgccgggcggcccaggctcatggagttcatcagcaggcgcagctcggtgccggccatcaccccggaaatcgccttgagggcaaattgcaggcgcacccccagttcattgcgcggcaggtccggcaaggccagggcgaaggcttcgaagaaacgctggaacaccggctggtaatgcaccttgaggtattcctggataaacggcgaggtgtcgctgtagacccgccccaggaagcgaatgaacgaacgcccttccccactggcgctggccgggtcgctgcgctccaggcccatggccggggcaaacagcacgccgagcaaggtgtcgcagtccagtgggccgtcggactcggcttcacaccgcgccaacagttccaggcgctgctcgttgagcggctccaggcgctgcttgagcagggtttgcatcagggagtccttgtccccgaagtggtagttcaccgccgccaggttgacctgggcacgctcggtaatctgccgtaacaaaaccgcgtcatatccgtacttgatgaagagagcctctgtcgcatccagcaatcgagtcttggtaatgtttggagcgctgactttcttcgcgaccatagaagttccacgtgggaaatattgttttaaaaaataatttgattttttataccggggccgccgcctgaaagcaagtagtgacactgcgccatatgatcaaaagcctgtgcccacgggctcgttcaggctggtcgaacggtttttgagcggactgcgacgcccttgaggaaatcgtttcaaaggatgaaaccgctctatatccatggctggcgaagcagcaggaacacggttagtattcaaacaatattttaaaaacaagaaataaaaccagtccgtgacgcacgccaggccgctcccgaacttgtaacaatgcttttccggggaccgcacggcatcgtcgagactgcaggcgtagtcatgatgacagatacccccgcgcacccaggcttgatctccctgcaaggcatcggcaaaagctatcagctggccgggcaacacctggccattctcaatgatgtgtgcctgtccatcgccagtggcgacagctgcggcatcctcggtgcctcgggttcgggcaaaagtacccttctgaacatccttggcctgctggacctgcccaactgcggtcagtaccacttcgccggccacgatattttcaacgccacaccggaccagttggccgccatccgcaaccagcagatcggcttcgtgttccagagtttcaacctgctgccgcgcctcagcgccctggacaacgttgccctgcccttgagttatcgcggcgtatcacggcatgagtcagtggaacaggccctgcgcatgctggagcaggtcggcctggccgaccgcgcccaccaccgccccgccgacctatccggcggccagcgccaacgggtcgccatcgcgcgggcactggtgggcaacccgtcggtgatcctcgccgacgaacccaccggcaacctcgacagcaccaccgcacaggagatcatggacctgctgctggcgttgaaccgcgaacagcaagtcacgctgatcatcgtcacccacgacccgcatatcgccgagcgcctggaacgcaagatcctagtgcgcaatggcgtggtgcaagaggcccgaagcctatgagcttgcgggtcgaacaaagcctcagccagctgctgcatgaagcgttcgtcagcctgcgcaccctgggcaagcgttcggtcctggccttgctgggcatcgtcatcggcagttcgtcggtggtggcgttgatcaacatcgggcataacgcggcagtggatgcggcaatgatcttcaaggacatgggcaccgacaccctgatcgcccagttcccagccaaaggcggtagcagcatcccgatgcccgcccgcctcgacctcgatgccgtgcgccaaaccgtgccgggcattgcccatatcggcgccctcacgctgttcagcgggccgatcgtgttccacggccgcaccaccaacgccaacttcgtcggcagcacgccagacatcaaggacgcgatgcgcctggtgatacagcaggggcgcttcctgtcgagcttcgatgccaacgaaacctacggcgtgatcggcgaccaactggcccaggcgctcggtgcgccaggtgaccccctgcaactgggcgaccgcgtgcgcatcaacgactacctgttcctgatcgtcggcatcctgcgcagccagccccgggcgatgctgatgccggtgcaggccaatgagtcgctgttcatccccgccgaaggcatgcgccgcatctatgccacaccgcagatcggcaatgtgatcatccgcgccacacccggccaggacatggagcgccttgccaaggacgtggctgccgccttgagctcgcagctcgccgaccacgatgcagacatccaggtgccccagcaaatgatcgacggcatgacccggcaaagccgcaccttcgcctatctgctgctggccctgggggcgatctccctggtgggcggtggcgtcggggtgatgaacgtgatgctgatgaacgtctcggagcgccgtcgcgagatcggcattcgcatggccctgggtgcgcgccaacgcgacatccgcaacctgttcctgctcgaagccgtgaccctcaccgccgtcggtgccctgtgtggcgccgtgctgggcatgacggcggcctggttgtacgcctggctgtcgggctgggaatttgccctggcggtcgccgccttgccgctgggggtgggcagcacgttgctggtggggttgttcttcggcatctacccggcggtctcggcctcgcggttgcaaccggtggaggccctgcgcgatgagtaaatggctatggctgctcgcattcgccagcctgcccggcatggccgccgatgtggtgatcaagccctcggcccccagcaccacccgcagcggctacgagcgcagcgtgtcgttgaacgcccagaccaccgccatgaccctcggggatgcggtgtacctgggcctgcgcaacaacccggcgatccgcagcgcgtacctgcaacgggtggcccagaagttcgacctgcgcgtggccgaagatgtgttcaaccccaaactcaccctcaacagttactaccgcagcacccggggctccgccgacagtgcgcgcaatgccaacgtggcgcccgccaccagcctgctcggcgagtacggcacgcgcctgagcatggcctggacccagcaactgagcaacgccgaccgcgccggtcgctaccgcagcgacggcctggacctggcagtcatccaaccgctgctgcgtggcgccggctgggacgccaccaccgcgccgctgcgcctgtcacgcctgtcggaacaggccaaccgccttaacctcaaggccactgtggcgcagaccatcagccagatcatcgccacctaccgcgaactgctgcgcgcccaggagcaactgagcatcgtgcaggatgcgctcaagcgttccggcaccttgctggacgtgaacaaggcgctgatcagtgccgggcgcatggccgaattcgaaatcgtgcagaccgaagccgacatcgccacccagcaactgggcgtggaggaagcgcagaaccaactggacaccagccgcctcgccctgctgcgcctgctggcgctggacctgtccacgccgattcgcgccaccgaagccctggaggccaggcccatgcagatcgacaagcgccaggccttcaccctggcgcagacccagcaacccgaatacctcgccgccctgctcggcagccaacaggccgacctcaacttggtgatcgccaaggactcggggcgctggcaagtggacctggtggccggcgctaaccaggtgcgcgccaacaccgacaacgacgcgggccgttccaacaaccgtacctgggacagctacgccggggtgcaggtgcagattcccatcggcgatatcagcacgcgccaggccgaagtgcgcgcacgggtgaatgtggaggaccaggccatccgcatcaccgatgcgcgccaggaattggaacgcagcgtcaacgatgtggtgcgtgaccttggtacgcgctggcgccagtatgaaatctcccagcgcgccgtggaattgtcgcggcgcaagatcgaaatcgagcgggaaaaactcagcgccgggcgctccaccaacttccaggtgctgagcttcgagaccgatttgcgcaacgccgaaaacgcgcaactgaatgcgctgatcgcttatttgaacgcccagactcagctcgacttgaccctgggcatgacgctggaaagttgggaaatcgccctcaatgactactaatcagaaacgcctgctgggtgttgtgttgatcgtcctgctcggcggcgcgggcctggccttgcgcagcccggcgtccgatccaggcgctgccagcgaacagtggctggccgtcaagcccgaggcgctggagcaccggatcggcctggtaggcaagatcgagcccgacaccaccatcaccctcaccgcgcccttcgatggcaacgtgcaagccaacctggtggaacaaggccagcgggtcgaggccgggcaggtgctgttgcgcatggacccggccacgctggaggtgcaattgcgcgaagcgctttccgcccagctcaaggcccggcgcaccgtgcaagagatgcaggactgggacagtagccccgccgtcagccgcgcccgccgcagcctgcgcaccgccgaaatgaccgccggcaacacccagcgcaaactcaccgaaagcgaaaacctgttcaagcgcggcatcatcccgcgcaatgaactggacgacctcaagcaacagacccagcagcaacagctggaccttgcctcggcccgcagcgaactgcaacaggccatcgaccagggcaagggcgagtaccgccagatcgccgatatggaactgaccaacgccacggtgaaatacgacgccctgcacaaactgctcgatggccaggaggtcaaggcgccgttctccggcatcgtggtgccgccaccgggcaacacctcatcccagggcggcggcaataacaatgccccggtgcaggccggcagcaaggtcagccagggccaggtgctgtttgggctggcgaatatcgaacgactgaaaatcaccgccaaggtctcggagctggacatcaaccaattgcaccagggccaggcggtggaagtgctgggcgacgggtttgatggcgagcgcctgaccggctcggtaagcgtggtcagcggcctggcgattgccaacgacagccagggcagcgcgcagtttccggtgaccctgtcgatccccaagctcacgccgcagcagttgcaacgggtgcgcctggggatgagtgcgcgattgaccatcgtgacctacaacaatgcccaggcgatggtgattccgagccaggcgatccaggcagatcacacggtggagtatcgggaggcgatggataaaccggtggagcgggtgaaagtgaccacggggcaagcaacggcgcagggcgtggaggtgttcggcctcaagccgggcttcgtgaagacctcaagataaatggagcccctgccacatttagatctctgtcagctttgaagccagtgccttggcttgcagcgccacatcagtcaccgccgtgctttcccaccacatcccacgcaacggcgggcccatggcgaacaatcgctggctgacctgcccctgggcgtccaccactgcccccgacgtatccgccgcaatccccaacgccagcggccctggctggatcagcccacgcttgagcaactgccggggcaatggccgggccacgcggcgccagtcgtattcgataccgctggagttgatcagcgctgcgcctgagaccagggtgatgccttgttcgccgcgataacgcaaacgaatcgtcaccccttcacccgaaggttccagccccttgaacgacgccgcaaggatccgcaaccgcccctcttcatgcagccgcgccaccaactgcgcgctcaatggcggcgaacggtggtgatggctctcccaccagggccgcacatgcctgacgaactggcgcttctcacgctcgctggcctggctccataaacgcgcgatatgcgcacgcacggtgtccagcggcgcttgccagtcgatgccctgggcctgcgcaagcgcgcattgccgccgcacctcgcgcagcaattgccgagggctgcgcaggccatggtcctccccaagaaaatccacccaggccggcggttgccgccgcacatggggcagcaggccgtgacgcgagaacacctcgatcggcccgcgatgcccggcctgttccagggagaccacggcgtcgaccatggtcagcccggaaccgatgatcagcaccggcgcctgcgggtcgatccggcgcatcgcgctcacgtcccacgggtccaccgccgccgcgttcaacccgctggagtcggtctgcggtgtacgcgccgccgggaacatgccggtagccagtaccgcaaacgcgccacgcaattgctggccgttatcgagggtcagcagggttgagcctgcatccacttgcaggtcgaccacttcgccacgcacatgctccacgctggacgcggactgcgccttcgcctcggccaaacgttgctgggcatacaagccgaatatcccgcgtggcgggaacagttcgctgatcggcacgtgctgctggtcggactcgggccagccgccagcgccgatgtagtcggtgagccattgggtcaggtcgtctgggttgtccgggtcgacactcatgcgcgccgcgttgccgttcagggtgtggcccagttcgacggcgctgtaggcctcgccccggcccagctcggcacgcggttcgaccaccagcacccggcgcgcgcccggcaggcgcagcagttgcacggccagcatcgtgccgctcaggccgccgccgatgatcaggacatcagcgttgcggatggattcagtcatgcggagtcgcccttactgtttgcccaggtaaatgtcatgcagatcaccccgcgccagcagttcagcggcgctgccactcaaggccacgtgcccagtatccaatacgtagccgtgggacgcatagttcagcgcgacgttgatgttctgctcggcgatcaggaagctcacctgctgctcgcggttgagctgagcgatgatcgcgaaaatctcctgcacgatcataggcgccaaacccatggacggctcgtcgagcagtaccaaagtaggacgggtcatcaatgcccggccgatggcgaccatctgctgctcaccgcccgaggtgagaccggcgcgggtatggcgcttggtcttgagccgtgggaaccaggcgtagacacgttccaggtcgtgctccatgtcgcggcgactcaggcgtcgcacaaagccgccgctgcgcaggttgtcttccacgctcagttggccgaacacatggcggccctccaacacatgcaccatgccctggcgcacgcgctggctggggtcgatgccggccaggtcgccaccggcgtattcgatcacaccgcgactgacctcggcccgttcggcacgcaccaagccggagatggccttgagcgtggtgctcttgccggcgccattggcaccgagcaaggcgacgatggcgcccttgggcacgctcaacgacaccccggccaccgcgaggatcgcgccgtcgtagatcacttcgatatcgttgaccgtcagcagcgatggctgcgcggcagcggtggcgggctggctcatggtttattcatccccggtgcaggtgcgtggcgtcaggcctttttccttggcgaaggcggcggacttttcatcgatcaacggacgcaacagcgcacggtcggcggcgatccagtcgctgatcagcgtccaattggcgccgtcccactgctgcacccgcgccgagccgccaccctcgtggtcgcggcacgacagcttgaggttctgcatcaggcccaggtaacccatgtccttcaagcgcgcatcgtcgatgttcaggtgttccaggccccagcggccttcttcgccgttgagcgggcgcttgccgaatttggcctggccggtgcggatcgcctccaccgccacggcggcgttcaccaggccggagttgtagtagacgctgccgaagttcttcaggtccttgaggtcactgtggcccttgtcgaggatgtattgcttgaggcgtttgtggatctcgaaatccgccccggccgggtatggcgtaagggccaggtagcctttggcggcggcaccggcgggcaatacgtcttcgctggaactggcccagatatcgccgatgatgtggtccaccgggaagccgaagcgcgccgccgtcttcaccgccaccggcgtggacacgccccaggtgcgcaggaacacccagtccgggttggcctggcgcacctggcgccattgcgcggactgttcgttgccggggtcggccaccggaatctggatgttttcgaagccgtatttttccgccagcaacttcagcgggccgagggtttcgcgcccgtaggccgagtcgtggtagaccgtggcgatcttcttgcccttgagcttgtcgaaaccgccttcacgctcggcgatgtagttcaccagcgtcgaggcctcactgtagaaagtcagcatcaccgggaagttatacgggaacaccgtgccgtcggtggcttcggtgcgaccgtagccgagggtgatcagcgggatcttgtccacctcggcccgctcgctcagcgcatacgccgccggcgcgccattgggctggtacaccgcgaccggcgcgccatccaggccattcttgaagcgctcgtagcactcgatgcccttctccgccgtccactcggtctcgcattcctgccacaccagcttgacgccgttgatgccaccttcgacctcgttgatgtaacgcaggtagtcgatcatcccggcccacacctgcacgccgctggacgcataggcgcccacacggtaggtcgccaggggaatgaattgctggtccggcgaggccatcgcctgggggactgcaccggccaaagttgccagcgcaaaggcagcgccgaccagggaacgtttcaaggatgcacgcatagggattctcttaagggaatgtcagaaacgcagcggccactgccgcacgcggtcacgcaggttgtgcaacaggcgaatcaagccctcgggctccttgatcaggaacacgatgatcaacacgccaaaaatgattttctgcaggttctgcaactgccccgcatccaccgagccgccgaacagtgcctgcccggcgtggctgaggaagatcggcagcaaactgataaaggccgcgccgacaaagttgccggcgatactgcccatgccgccgataatgatgatgaacaggatctggaaggagcggttgatatcgaagctgctggcgctggccgtgcccaggtaggcaaaggcccacagcgcaccggctatccccaggtagaacgagctgaccgcgaacgccaggcgcttgtagcgcaccaccgggatgccgaccacggcggcggcggtgtccatgtcgcggatcgccatccagttgcgcccgacctggctgcgcaccaggttgagggcggtccaggtcagcagcagcacggtgaccagggtcagcaggtagcggcccaatggtgtgttgaggtcatgaccgaacagcgccagcctgggcgcggaaatggtcccggacgaaccgtagttgtagaaccagggaaacttgacgaacagccattccaggaagaactgtgcggccagggtggtgaccatcaggtagaagcccttgatccgcgaactgggcaggccgaacagcaggccaaccaacgcactgatgatcccgccgccgagcagcgcaaccggcaaacccagatccggcaggcgcagcagaaaaccgtaggtggcaaacgcaccgacggccatgaagccggccgcgcccaccgaggtctgcccggtgtagccggtgagcaggttcagacccagccccgccagggacagcaccaggaacgggatcaggatcgcattcagccaatagtcattgccccacagcggcaccccgataaaagccagtgccaacaggccgatcaaggcccagggaatgcgccgctgaatcagcagcaacggcgcggtgtgttgtacaagagggatcgacatgctttcagactcgctcgatggcgcgctcgccgaacaggccggcggggcggatatacaggaaggccagggccagtacgtaggcgaaccacggcgtgataccgccgccgatcaacgggccgatgtacacctcggccaggttctccgccgcgccgacaatcagtccgccgacaatcgccccgccaatcgaggtaaagccgccgatgatcaacaccggcaaggccttgagcaccaccagcgacagcgagaactgcacgccctgacgcgcgccccacagcaacccggccaccagcccgacgatgccggccacggcccagacgatctgccagatgcggttgaggttgatgccgatggacagcgccgccgtggtgtcatccgccaccgcgcgcagcgacacaccgatgcgggtcttgttgaacagcagcgccagcaccgtcaccagcaccaccgccgcagcggcagcgatcaggtcgaactggctgagcatcagcgggccgacgaacagcggcacgtcgtcgatgcccaggtccagcgcccgcacctgggagcccatcaacccctgggccaggccttcgataatgaacgacaggcccagcgtggccatgaacaaggtgatctgcgaacggttcaccagtggcctgaggaccaggcgctcgatcagcagcgcgccgacgctcatcacgatcaccgtgagcagcaacgccagggcaaacggcacgccctggtcatgcaggctgacgaaggtcagtgcagcaaacagcagcatcgcgccctgggcaaaattgaatacgccactggccttgtagatcagcacgaagccgatggcgaccagcgaatacatggtgccggcgagcaggccgccgagcagggtttcaaagaaaaacgtcatccgtttaccactcccaggtaggccgcgatcacctcgggattggcttggacctgagccggcgtgccgtcaccgaccttgcgcccgtagtcgagcaccaccacatggtcggacaggcccatgaccacgcccatgtcgtgttcgatcaacaccacggtggtgccgaggtcgcggttgacgtcggcgacgaagcgcgccatttcctgtttttcttcggcgttcatgccggccatgggctcgtccagcagcaacaagctcggccctgcgatcaacgcccggcccagttccacgcgcttttgcaggccgtaggacaggttgcccaccagcacatcgcggtgggcttgcagctccaggaattcgagaatgccctgtgcgcgcaaccggaacgccttggcttcgcggcgtgcgcgaggcaagcccagggcttgttcgataaagctgctacgcatatgccgcgacaggccggtgaggatgttgtcgagcacactcatcttcttgaacagcgcgttgttctggaaggtgcggccaatgccgcggcgcgcggcgcccaacgggtcgatgcggtggaagtgctggtcctcgaacacgatctcaccggcatcaaagcggtacacgccgttgagcacgttgagcaacgagcttttaccggcaccattgggaccgatcagcgcgcagatctcgccgcgcagcacctcgaaggacagggcattgatcgccttgacccccttgaacgacagcgagatatcccgcacctgcaaaatggcctggctcatgcgatgtcccgtttgaattccgccacccacaccggtgaaggcgtggctttgacgggttgccagatgtacgccaggcgctggaaccccaggagccggcgcacgcggtttttcagcaggcgccgcaagccactttgcgggtgggcgatggcccagtcgcacaggcgtcggcgccaggtgccgtggggcgccaggcggctttcgatctcatcggccaggtgctgcaagcgggcgggcgacaacagcaggccggtgggcgcgacttcactgcggtcgcgacgcgccgaggccaggctctccgggaaggccaggccgtgaccactgttcagccattgctccagcaccacggccagaccgccctgccagtgggtaccctcttcgctccacaacagggtttcccccgtgggctgccaccagcgtgccaggtgttgcgtcggcgccaacgggccgagcaactgggcaaaatccaacaagttggccgactgccagtgccgcgcagtctggcggccctgcacataggaatgagtcgggcgaatgcgccacaggtgctgttgcagtgcctcgggctccaggtcatcggccagggtcagcacctgcccgccgatgacgtgcgccgccagggccagcagcaacaggttcggctcgaacgcaccgctgagggccagccgcgattgctcgctgaacccctgctggcgcaaaccatcggccaggcgttccacatcgcgcaaggcgtcgatccagcgccatgcgcaccactgcccccggcgcttgtggcgcagggcactatgcagcggcgtgatctgcgcccagtggtgcagttgttcgagggccttgggcaggtggccgagccactcggcgggccactccacggccagtgggcgtttgagttcgtgcacgctcataggggtagtgctcctattggtgtgtgtgcgtgcggtggtccgctggctggattatttggatcaacaccgatctactgtgggagggggcttgcccccgatggcggtgtgtcagtcacaagtgctttgactggactgccgctatcgggggcaagccccctcccacattggttatgtgcgcgtcagataaattgcggtagccggcaccagggtggttggaggccaaccttgcgccgtcgccaaacaacttctcgcgcaacgtgccctgggcatactcggtcttgtacaccccgcgcttctgcaactccggcaccagcaggtccacggcgtcgatgaaggtctcgtgggtcagcgcgtaggccaggttgaagccgtccacatcggtctcttcgacccattcctgcaacaggtccgcgacggtttccgggccgccgacgaacagcgggccaaagccgccgataccgacccagtcggccagttcattcggggtccagaccttgttcggatcggccgtcgagaacgcctctaccgccgattgaatggcgttggtgtgcacgtgcttgagcggtgcatcgggtttgaactggctgaagtcgatgccggtccagccggaaatcagcgccatcgctccctcgtagctgacgtaggatttgtattcctcgaacttggctttggccttggcatcggtctcaccgacaatcacggtctgcaagttgaagatcaggattttctgcggatcgcgcccggcttcggcggcacggcggcggatgtcggcgacggtctttttcagcagcaccttggacggcgcggcgacgaatacgcactcggcctgttcggcggcgaactgcttgccacggctggacgcgcccgcctggtagagcactggcgtgcgctgcggcgacggttcacagaggtgaatgccgggcacctggaagtgtttgccgacatggcggatctcgtggattttgctcgggtcgctgaagatccggcgttcgcgatcacgcaacacggcgccctcctcccaactgccctcccagagcttgtagcagacctccaggtattcctcggcgtagtcgtagcgcgcatcgtgttcggtctgggctttctggccgaggttcttggcgccgctttccaggtaggaggtgacgatgttccagccgatacggcccttggtcaggtgatccagggtggagagacggcgggcgaacgggtacgggtgttcgaacgacaacgacgccgtcaggccgaagcccaagtgttcggtaaccagggccatcggcgcgatcaacgacagcgggtcattgaccggcacctgcgtcgcctggcgaatggccgcgtcgccgttgccgttgtacacatcatagatgcccagcacgtcggcgataaacaggccgtcgaactttccgcgttcaaggattttggcgaggtcggtccagtattccaggtccttgtactgccacgaacggtcacgtggatgcgcccacaggcccggggattggtggccgacacagttcatgtcgaaggcattcaagcggatttcacgggacatcaaagcactccgttgaggtggtagttgccgacgatctggtacttcgtacgcagcgggtcatccaggctcgacggcagtgcggtgcgttggccggtgagttcgaactcggcgttgctcgcggcgatcagggcttcggcggcggcgatttgcgcttcggtagccgcgacggggctggggtgggtttcggcgcgttcaaacaaagccgcagccacatcgacgcgaatctgcaagtcgccgaaacggctgatcacgtaggggtcggtgctgttttcaacgtggcggcgggtgctgtccagcagttggcgcgcaaggttcagtgcagtcatgggtgaggctcctcagttccaggcgtggcgcgcaggcttcacgccgttgagcacgtagttgccgatcaggtggtatttccagcgggccgggtcgtgcagggtgtgggtgcgcgcgttgcgccagaagcggtcgaggttgtgcttgccggtgaccgagcgggtgccggccagttcgaacagtttgctgctggcgagcaaggcggtttcggcagaaaggactttggcttgggcaaccaccagtgaggcgtgggcgacgctgtcttcgccgggctcggcgagggcgcggtccacggcttcccccgctttggcgaggatggcttcggtgccgtgcacgcgccattccaggtcgccgatggcggcgatggtgaacgggtcctgccagccgtgatcctgttggctgtcgatccagggccgcgcctggcgtgcgtagattttcgcctgctccaaagcgccaacggcaataccggtatcgaccgccgcctgaatgatctgcgaaatcggaccattggcggtgggctggtcaaaagcctgatgcgcagggatcaccgcgctcaagggcacagtcacaccatcgagggtcacgccaccactggcggtggtgcgctggccgaaaccgtcccagctgtcgatcacgttcaggccgggcgcgtcacgttcgacaaacgcgataaaggcctggccgtcttcattgttgccgacggtgggcaccaggtgagcgaacagcgcgccggtgcagtagaacttctcgccgttgatttgcgcggtatcgccgtgaaagcgaatctgggtatcgaaggtgccggcgttcttgctcttggcttcggaaaaggcgttgccgaaacggtagccctggaggactttgccgaagtagtactgtttttgtgcctcggtcgcggtttgcagcaggatgtccaccacgcccaggtggttctgcgggatctgccccagggacggatcggcggcagagatcaatttgatcacctcggccacggtcacataggacacgccagcgccgccgtacgctttgggaatggtgatgccccacaggccgctggcggagaactcgtcaagctcggccactggcaggcgccgctcacggtcgcgggcgctggcctcgatggcaaagcgtgcggccaggcgcgtggcgacctcgatcgcttccgcgtccgagcggatgatatgggcagggtgttgagggtgggctgacatgggccgactccaggctccgaggggattacctgggtgattgcaggagtcgtgcctgaatgtgacagtccatgaaaccggctgattgccttgtagaaaacggagcaacacatcactgaaatcagcaaactgcctgacaagtgttgctccagcaacagtctcctgttgattaaaatgtgggactgacgcttattaaaattttaatcctcgatcgtatacacagcttctgccgagtggttaacattgttgacgatatagctggcggtagcagtcgttgcgggagaagcaaagagcgcatcaaaaagtttaaattcaagcatctggtcgatatcagtgaccgtcgcttgcgagaagaaaatccattgaccatcggtagaaacctgaacataaaccacgtccccaactgcaatccctggatacagcggtatgcagagccgtgctctgttacctgcaattgctgcacgagaaataacattgttacttgagggcacaatagagggggcagaaagcaggtcagagcgagatactagaattccgttcattaataaatcctcactaattaaagtcaaaggtgcgccctgccgtatttggtacgaatatcgattttaaaatcactgtacaaaaacaaggcaagtgaaactaaagcgcccttcaaatataaacagggaactcaaaaaagtaagctgtgaactttgacagttgacaaactaaataacgacattccgtacaaactttactgcgacgcccccatcattgcgataggcatgaggctgatggctggcaaacatgaaaaactcgcccgtaccaattgtcttgtcttcacctgccaacaccagagtcaagcaaccctcaaagacaaacagctgctcgctccagccttcaaggtctgggtccgggcagtagcgatcgccaggttcaaggcgccactcccagagttcgacttcacgccgcgccgtggccttggccagcaacaccgccttgctgccgggaatttcaccggcccaggccagctcattgatacggctatggtcacgcacatccggcgcctggatcaggtcgctgaacgccacgtccaacgcttcggccacgcggtcgagggtggacaagctgacgttcttttcgcccgcctcgatggccactagcatgcgccggctgaccccggatttttccgagagcaaggtctggctgaggtcggcggcatggcgcaggcgacggacgttctggctgacgtgctgcaggaccgaagcccggtggggattttctttgtgcactatattgctcaatgggtgggtgtgcgcagtatactgcccagcgtgcggcgcattgtgcggtccgtgcctttcccttgcaagaccgagccgccatgaccaccccgaacgcctcccctcgtttcaaccgtttcagcaaagccgagtgcatcctggtggtgatcaccatgatctggggcggcacatttttgctggtgcagcacgcaatgacggtcagcgggccgatgttttttgtcgggttgcggtttgccgccgcggcgattgtggtggggttcttttccttgcgcacgttgcgcgacctgacgctgttcgaattgaaggccggagtgtttatcggtgtggcgatcatgtttggctacgggctgcaaacgattggcttgcagaccatcttgagcagtcaatcggcgtttatcacggcgttatatgtgccgttcgtaccgctgttgcaatggctggtgcttggccgtcgcccggggttgatgccgagcatcggtattatgctggcgtttaccggcttgatgctgctgaccgggccggcgggggcttcgctgaatttcagtcccggtgaaatcgccacgttgatcggtgcggtggcaatcgcggcggagatcatcctgatcagcgcctttgccgggcaggtggacgtgcgtcgggtgaccgtggtgcaactggccacggcgtcgttgctgtcgttcctgatggtggtgccaatgggcgaggcgttgccggggttttcgtggttgctgctgttcagcgcggtgggcctgggcttgaccagtgcggtgatccaggtggcgatgaattgggcgcagcaaagtgtttcgccgacccgcgccacgttgatttatgccggtgagccggtgtgggccggcgtggtcgggcggattgccggggaacgcttcccgccgatcgcgatggtgggggcggcgttgattgtgttggcggtgattgtcagcgagatgaagaccaaggggcagaaggccctggaattgcgcgatgagagggaacaggaacagcagggataaggtccgagtacttgcagtggctgtcagatcgccatcgcgggcaagcccggctcccacaggggggggcggtgtcgcttgcccgaatcgggttacctgaaacaatgccaaatgggcgatttcggcttagcttgtaggatcctgccacatcttgccgtttggtgatcgtgaaagcggcacgtatgatgcatcccaaactcccgcagattagaagcctatgtccctgatagttctactgcttctgccgttcattggcagctgtctggcggccttgctgccgcacaatgcacgtaacaccgaatccctgctggccggccttgtggccctggtcggcaccattcaagtcgccctgctctacccccagatcgcccacggtggcgtgatccgcgaagaattcatgtggttgcccagcctcgggctgaacttcgtgctacgcatggatgggtttgcctggctgttctcgatgctggtgctgggcatcggcacgctggtgtcgctgtatgcgcgctattacatgtcgccagacgacccggtgccacgcttcttcgcgtttttcctggcgttcatgggcgccatgctcgggctggtgatctccggcaacctgatccagatcgtgttcttctgggaactgaccagcctgttctcgttcctgttgatcggctattggcaccaccgcgccgatgcacgccgtggggcgtacatggcactgatggtcaccggcgccggcggtctgtgcctgttggcgggggtgatgctgctggggcatatcgtcggcagctatgacctggaccaggtgctggcggcaggcgagcagatccgcgcgcattcgctgtacccggccatgctggccctggtgctgatcggcgccttgagcaaaagcgcgcagttccccttccacttctggctgccccacgcgatggcggcccctacgccggtgtcggcgtacctgcattcggcaacgatggtgaaggccggcgtgttcctgctggcccgcctgtggccgtcgctgtccggcagcgaagaatggttctggatcgtcggcggtgccggcgccctcaccctcctcctcggcgcttactgcgccatgttccagaatgatctcaagggcctgctggcctactccaccatcagccacctcgggctgatcaccttattgcttggcctgaacagcccgctggccgccgtcgcggcagtgttccatatcctcaaccacgccacgttcaaggcctcgctgttcatggctgcaggcatcatcgaccacgaaagcggcacgcgggacatccgcaagctcagcgggctggtgcgtttgatcccgtttaccgcgaccctggcgatggtggccagtgcgtccatggccggcgtgccgttgctcaatggcttcctgtccaaagagatgttcttcgccgaaaccgtgttcatcacctcgaccgcttgggtggagttcgccctgccgctgatcgcgaccatcgccggtacgttcagcgtggcctacgccctgcgcttcaccgtcgacgtgttcttcggcccgcccgcgaccgatctgccgcacacaccccacgaaccaccgcgctggatgcgcgcaccagtcgagttgctggtgttcacctgcctgctggtgggcatcttcccggcccaggtggtcggctcgatcctcgccgccgccgcgttgccggtggtgggtggtgtactgcccgagtacagcctggcgatctggcacggctggaacgcaccgatgatcatgagcctggtggccatgtccggcggcgtggtgctgtacctgctgctgcgcaagcaactcaagcgtggtcgcttcaaatacccgccggtgatcagctacttcaacggcaagcgcggcttcgagcgcagcctggtggtgatgatgcgcggcgtgcgcaggatcgaaaaacgcatcagcaccaagcgcctgcagacccagttgttcctgctggtgctggtggcggtggtcggcggcatgatcccgatgctcaacagtggcctcagttggggcgaccgaccgaagatcccgggttccatcgtattcgtgaccctgtggctgctggcgattgcctgtgccctcggcgccgcctggcaagccaagtaccaccggctggcggccctgaccatggtcagcgtgtgcggcctgatgacctgcgtgaccttcgtgtggttctcggcaccggacctggcgctgacccagttggtggtcgaagtggtgaccaccgtgctgatcctgctcggcctgcgctggctgccacggcggatcgaagaggtgtcgccgctgcccagctcgctgcgcaaggcgcgcatccgtcgcctgcgtgacttcctgttgtccaccgtggtgggcggcggtatggcgttgctgtcctacgcgatgctgacccgccagacgcccaacgatatctcctcgttctacttgagccgcgccctgcccgagggcggcggcagcaatgtggtgaacgtgatgctggtggacttccggggcttcgacaccctcggtgaaatcaccgtgctcggcgccgtggcgctgacagtgtacgccctgctgcggcgcttccgcccttcaaaagagagcatggagttgccgccgcaacagcgccagctggcgccggacgtggccaccgacctggtcaacccgcgccaggccagcgacaccgcgctgggcttcatgatggtgccggcggtgctggtgcgcctgctgctgccgattgcgctggtggtgtcgttctacctgttcatgcgcggccacaaccaaccgggtggcgggtttgttgccggcctggtgatgtcggtggcgtttatcctgcaatacatggtcgctggcacgcagtgggtcgaggcgcaaatgagcctgcggccgatgcgctggatgggcttcgggctgctgtcggcaaccctgaccgggctcggcgcgttgttcgccggctacccgttcctcaccactcacacctggcatttcagcctgccgctgctcggcgacatccatatcgccagcgcgctgttcttcgacgtcggcgtgtacgccatggtcgttggctcgacgctgctgatgctcactgccctcggccaccagtccgtgcgggcccataaaccgagcaaccaggccaaagtggttgccgcaacggaaggagccgcctgatggaagaagtcatcgcaattgccattggagtcctggcggcttccggcgtctggttgatcctgcgaccacggaccttccaggtggtgatgggtctgtgcctgctgtcatacggggtcaacctgttcattttcagcatgggcagcctgtttatcggcaaggagccgatcatcaaggacggcgtgccgcaagacctgctcaactacaccgatcccctgccccaggccctggtgctcacggccatcgtgatcagctttgccatgaccgcgctgttccttgtggtgctgctggcgtcacggggcctgaccggcaccgaccatgtggacggccgggagcccaaggaatgaattgggtgaatcaactgatcgtcgcaccgatcctgctgccgttgctgaccgccgcgctgatgctgatgcttggcgaaaagcgccgcccgctcaaggcgaaaatcaatctgttctccagcgtcatcggcctgggcatcgccatcctgctgctgtactggacgcaaaaaggcggcccaggctcgattggggtttacctgccgggcaactggcaagtgccgttcggcattgtgctggtggtggaccaactgtcggcgctgatgctggtgctcaccgggatcatcggcgtaagtgcgctgctgttcgccatggcccgctgggatcgcgcgggcaccagcttccacgcgctgttccagatccagatgatgggcctgtacggcgcgttcctgaccgccgacctgttcaacctgttcgtgttcttcgaagtgctgctggcggcctcctatggcctgatgctgcacggctccgggcgtgcgcgagtgtcgtcggggctgcattacatcgcgatcaacttgctggcatcgtcgctgttcctgattggcgcggcgatgatctacggcgtcaccggcacgctgaacttcgctgacctggcgctgaaaatcccactggtgccggaggctgatcgtggcctgttgcacgctggggcggcgatcctggcgacggcgttcctggccaaggccggcatgtggccgctgaacttctggctggagcccgcctactcgtcggcgagtgcgccggtggcggcgatgtttgcgatcatgaccaaggttggcgtgtacaccgtgctgcgcctgtggaccctgctgttctccagccaggccggggcgtcggcgctgtttggtggggattggctggtgtatggcggcatggcgaccatcatctgcgcggcactggcgatggtcgcggcgcagcgcctggagcgcatggccagcttgagcatcctggtgtcggcgggaattctgttgtccgcagtggggtttgcccagccaagcctgacggcgggcgcgctgttctatctggtcagttctaccttggccttgagcgcgctgttcctgctggctgaattgatcgaacggtcacgctcggccaatgacctgccgctggatgaagagatcgatgcgctgcccaaggccatggaatccctgcatccgcgccctggcgtcaacctcgatgacgagcagcaagccgtggtcggccaggtgatcccctggaccatggcgttcctcggcttgagctttattgcctgtgccctgctgattatcggcatgccgccgctctccgggtttatcggcaagctcagtctgttgagtgcgctggtcaatccgctgggcctgggcgtcagtgttgacgaaccgatccgaccggccgcctggggcttggtggcgctgctgattctctccggcctggcctcgctgattgccttcgcacgcctgggcatccagcgtttctggacccctgaggaacgcccttcgccgctgctgcgtcgctacgagtgcttgccgatcttcttcctgctgggcttgagcatcctgctgaccttcaaggccgagccgctgatgcgctacacccaggccaccgccgtcagcctgaacaacccggaacactacgtgatggcggtgatggcgacgcggccggtggcgagtcctgaagccaaggctgccgcactggaggtacagccatgaaacgactgttccctgccccgtggttgtccctggcgttgtgggtgttgtggctggtgctgaacctgtccgtcagccccggcaacctgctgctgggcgcgctgttgggctttctcgcgccgctgctgatggcgccgttgcggccgttgcccatccgtatccgccgccctggcgtgatcatccgcctgtttttcctggtgggccgcgacgtgatcgcctccaacctgcaagtggcctggggcgtgctgatgtgtagctcccgcccgccgcgttcgcgcttcatcaagatccccctggacttgcgtgatgccaacggcctggccgcgctgtcgatgatcaccacagtggtgcctggcaccatctggtcggaactggcgctggaccgcagcatcctgctcctgcatgtgtttgacctggaggatgaagcgtctttcatcgagcacttcaagtccgcctacgagcggcccctgatggagatcttcgaatgagcgccctgctcgccaatgcgatcctgttcagcctgttcctgttctccctggccatggtgctgaccctggtgcgcctgttcaaaggcccatcagcccaggaccgggtactggcgctggactacctgtacatcctggcgatgttgatgatgctgacgctgggcattcgttatgccagtgacacctactttgaagcggcgctgctgatcgcgctgttcggcttcgtgggctcgtttgccctggcgaaattcctgctgcgtggggaggtgattgaatgatgccgttatggatggaaatcgtcgtggccgtgctgctggtgctcagcagtgtatttgcattgattggcgcgatcgggttgctgcgcatgaaggacttcttccagcgcatgcacccgccggcactcgcatcgacgctgggagcgtggtgtgtggcgttggcgtcgatcatttatttttcggtgctcaagtccgggccggtgttgcacgggtggctgattccgattctgctgtcgatcaccgtgccggtgaccacgttgctgttggcgcgcacggcgttgttccgcaagcgcatggctggcgatgatgtacccgccgaagtcagcagccgccgttgatccctatagaaaacacggtcaaaactgtgggagggggcttgcccccgatggcggtggatcagtcagcttacctgtagctgacccactgctatcgggggcaagccccctcccacatttggattggcgctaggcaaaagacctgatgtgcgccgccaattccgccaacccctcatcatcggcccgcacatgatcgtgggaggagatgtacccttcatatgcctcgaagaacttgtccaccttcgaactcagcggcttgaaggtactgtcgccgccggtcccatgcatgggaaacagcttcgcatgcaggtgatccaccccatacccttccaggatcatcccggtgcgcgccacatcggaaaacgcacggtcgatctgctgtgcggttttctttgcggcgacggcgagcccggccaacacttcatccgactgtgcaaacgcatagctgccgtaatgctgcttggggatcaccacgctgaaacccggggtgttggggaagatcgataagaaggccatgtgctggtcgtcttcccacaggatgtgcgccggggaagtcttttggacgatgctgcagaaaatacacgtcattcgagtctccatcagtggttcttggtggccttcaaatagcacaacttccattacaagataggcgagccaaacctgcgaaaccgcggcatccaatcacccagaatctgcgccgacgccagcacatgatgcgcccgcccgatcaacagccggcgtggcacaacgccgatgtaccgggaatcatcgctgttgtcgcggttgtccccgagcatgaaatagctgtcggccggcaccaccagcggcccgaaactgcgcatcgctcgcaccgtcggcatgaactgcaccgtgcgctgccggttggccgccaactcgttcagcttgattcccggcaccgcatggccgggaacgatgggctcgctgatgtcctgcgcatcactgtaggtggcaggcacgccgttgacccacaacacctcatctttcatttccagggtgtcaccgggtatgccgacgatgcgcttgatcaggcgcatgccgtccttgggcgacgagaacgttaccacatcgccacgttgggggttatcgagctgggccagggaaatgtccgtgagcggcagcttgaggtcgtaggccacacgattgaccaacaccacatcgccctccagcaaggtcgggcgcatggagccggagggaatgggattccagtccgccagggaggtgcggaaaacgccgaagcacaaccagaaaatgattgcgtaacggtaacggatcaaccaacttcgcatacatcctcgcacggcagacaggggcatcagggctgtttcccagacgcccggttgtttcacgcgaggattaaatcaacattagcgtccaagcgcacaaaaaggagttttcgccatggatatcaaatgttcggtgtttatcgccgccagcgtcgatggcttcatcgcccgcccggacggtgatatcgactggttgcaccggccggagtatgaaaccgccaagttgaacggtgtgacttacgaaagtttcatcgccacggtggatgcactggtgatgggacgcaagaccctggagaaggtactgtcctttgcggagtggccctatgagggtacgccggtcattgcgctcttccatcagcctctgcaaatccctgcgcatctggagggcaaggtcgaggtcatggcaggagacgtcacctcactcgtggcaacgttagccgagcgcggcatgaagcacctctatatcgacggaggccagacgatccaggcgtttcttgaagcgggcctgatgaatgagctgatcattacgcgtatcccggttttactcgggcaagggatcccactcttcagccagatcggtcgagaacttgagcttcgccatatcggcacgcatgagtcggacaatggttttgttcaaagtcggtatcaagtgatgcaatcttcatagcggcggcagacactcacatcgcgcaagacggacagggggtcaggatgactaagcacattattgttatcggcggcgagtccaccgaagacatgcagcgtatgacgcgtatcgataaacatatcgtcgcgtcatcaggcaaaacgcaccctactgtgctctacatctctaccgccaatggcgatgaccgaatcaagatttccgatttcaccaccaaatatgaaagcgctggctgccgtgtaaccgcgctggcatttttcatttcacccttccccaacgccaatcatgtttcatcactctttgagcaagccgacattatttacgtaccaggcggaaatacccgcgcgatgttggcgatctggcgcgaatttgctgtagtggaccatctgaagaggtcctgggaaaacggcaaagtcctgtgtggtgtcagtgcaggcgccatttgctggttcgagcatgggcattccgattcagggggagtgtttgcgctggttcacggcctgggcttgctgccaggagcactgtgtccgcatttcagctcagaagcaggaagggaaacctcgtttgtcgagcttgttcagcgtgagggtatacaacctgcctacgcggtcgatgatggcgtcgctttgcatttcaaggacggcgagtatcacgagaccatctataacgacacagccaatagcgcctataaagtcagtacaaggccaccctacctagtacagatattgcgaacttcaggcgggtaagcgccgctaggaaatttccgacagcgttttaaggttttcgctcggaagatggctgcctaatcttcggtggtcgctgcaaattcagcgaccgggtttcgcagcccggttaaactctagacgcacagcgtccacctcagatagcgggcgcttttttatgcctgatgttatggcggctgtgcgcgggataccttcgggtatgccgggtgcctagagtcccggtctgcgaacctgcgtacagctgccacccgaatgtcgtttcgcagcgatgggtggtggctccaatactctaggagctttgccatgattaaagacagtccgaatccgccattagactcagccgcgtttcatactgcggctcatcgagcaattaaccactatctgaatccacctgagaaaccagagccttctactgaggaccatagtttatttactgtacgcgaaggattagacatcgagacgctgctggtcaacgcgtcggaggatcttgcctcggttcaagcgctggcaagccatttggcttttgagatcgacggcaatcctcgcagcgtggccttgggaatgtgtcggatgctggaggggatacagctaatggtggataaaacactaagcctcaaagaccatccaactcacacataaatctgaaaccgaagagttcgcaaagtgggcacggtaaaaaatgtgggagctggcttgcctgcgattgcggtgggtcagtcaacatttccggtgactgacacgccgtcatcgcaggcaagccagctcccacagtggatcgagtgaaacgttaaaccgatgtgcaaaaaaaacgccccgaaccagtcggggcgttttcattcagcgtttaccgatcaagcctgatccgccaaccgccacgtcgtcccacccttcccgtcttccaacaccacacccatcgcggtgagttggtcgcggatacggtcggattccgcccagtccttaccggcacgcgccgccaggcgcgcctggatcagcgcatccacctcagccgcatctacacgcccttcggcgccggcttgcaggaagtcctcaggcttcatttgcagaaccccaagcacactggccagctctttcaggcgcgccgccaggccggccgctgcgtcgaggtcgctctcgcgcaggcggttgatctcgcgcaccatctcgaacagcacggcgcaagcttctggggtgccgaagtcgtcgttcatcacttcggtgaagcgggccacgaaggcttcgccgccggccggcgctacggtcggcaggcctttcaacgcatggtagaaccgctccagggcgcccttggcgtccttgaggttgtcttccgagtagttgatggcgctgcggtagtggctcgataccagcaggtaacgcaccacttccgggtggtacttttccagcacgtcgcggatggtgaagaagttgttcaaggacttggacatcttctcgccattgatgcggatcatgccgcagtgcatccaggcgttggcgtaggtcttgccggtcgcggcttcgctctgggcgatttcgttttcatggtgcgggaactcgaggtcgctgccgccgccatgaatgtcgaaagtctcacccaggcagcaggtggacatcaccgagcattcgatgtgccagcccggacgcccggcgccccatggcgactcccagctcggctcgccgggcttggtggctttccacagtacgaaatcgagcgggtcctgcttggcttcgtcgacttcgatacgcgcgccgatgcgcaggtcttcgattttcttgcgcgacagcttgccgtagcccatgaacttggcgacgcggtagtacacgtcgccattgcccggcgcataggcgtaacccttgtcgatcagggtctggatcatcgcgtgcatgcccgggatatggtccgtggcacgcggttccatgtcaggcttgaggatattgaggcgggcctcgtcctcgtgcatcgcggcgatcatgcgctcggtcagcgcgtcgaacgactcgccgttttcgttggcgcggttgatgatcttgtcgtcgatgtcggtgatgttgcgcacataggtcaggtcatacccactgaaacgcaaccagcgggtcaccaggtcgaaggcaaccatgctgcggccgtggccgatgtggcagtagtcgtacacggtcatgccgcacacgtacatgcgcaccttgttgccgtccagcggcttgaagacttctttggtcttgctgagtgtgttgtagatcgttaacacgacaattcccttaagacagaatcactgaccccacgaatcacgcaaggtcacggtacggttgaataccgggcgacctggtttcgagtccttgatatccgcgcagaagtaaccttcgcgctcgaactggaaacggtcttccggctgtgcgtcgccaagcgatggctcggcacgacaacccgtaagtacttgcagggagtcagggttgatgttgtcgaggaaactcgcgctgtcttcggccttttcagggttcggcgagcggaacaggcgatcgtacagacgcacttcgcactcgatgctggcggccgccggcacccagtggatcacgcccttgaccttgcggccttcggggttcttgcccagggtgtccgggtcgtacgagcaacgcagttcgacgatgttgccatcggcgtccttgatcgcttcgtcggcacggatcacgtagctgccacgcaggcgcacttcgccgttcggctccaggcgtttgtagccttttggcggctcttccatgaagtcatcgcggtcgatgtagatttcacgggcgaacggcagcttgcgcacgccgagttcttctttctgcggatgacgcggcagctcgaggttatcgactttgtcttccgggtagttggtgatcacgactttcaacggacgcagcacgcacatggcgcgtggggcgttggcgtcgaggtcctggcggatgctgaactcaagcatgccgtagtcgaccacgccgtcggaacggttggtgccgaccatctcgcagaagttgcggatcgacgcaggcgtgtagccacggcgacggaagcccgacagcgtcgacatgcgtgggtcatcccagccatgcacatgcttttcatcaaccagttgcttgagcttgcgcttgctggtgatggtgtagttcaggttcaggcggctgaactcgtactgacgagggtgcgccggcaccggcaggctgtcgaggaaccattcgtacagcgggcgatggctttcgaactccagggtgcagatcgagtgggtgatgccttcgatggcgtccgactgaccgtgggtaaagtcgtagttcgggtagatgcaccacttgtcgcccgtctggtggtgatgggcgtggcggatgcggtacatgatcgggtcgcgcaggttcatgttcggcgaggccatgtcgatcttggcgcgcagtacgcgggcgccgtccgggaactcaccggcgcgcatgcgggcgaaccagtcgaggttctcttcgaccgaacggtcacggaacgggctgttcttgcccggctcggtcaggctgccacggtattccttggcctgctccggggtcaggtcgtcgacgtaggccttgccggccttgatcagctcgacggcccagtcgtgcagttggtcgaagtactgcgaggcatagcgcacttcaccggaccattcaaagcccagccatttcacgtcgctttcgatggcgtcgatgtattcctggtcttccttggccgggttggtgtcgtcgaaacgcaggtgcgtgacgccgccgaattcctgggccaggccgaagttcacacagatcgacttggcgtgaccgatgtgcaggtagccgttgggctctggcgggaagcgggtgacgatctgcgtgtgcttgcccgaatccaggtccgcctggatgatcgggcgcaggaaattgaccgggacggcaggtccggccttggaattcgaggtagggtcgacagtgggcttgctcataggatccttgaacagacaagtacgtggccgggctaggccgacaaaacaaagggcttatcatagctgatgctgtcaagccgctgacagggttgcggtgcatttaacgcaccagtggtaaaaaaccacctcgaaattcctgcaggtcacgctaaactgcgcgccttggccgcagtttcgccataccggtcgtggtgcccaggcacccaaatccacgaattccctgaaaagagtagtgaacatgactcaagtcaaactgaccaccaaccacggtgacatcgtcatcgagctgaacgccgagaaagcgccgatcaccgtcgccaacttcatcgagtacgtgaacgccggccactacgaaaacaccgttttccaccgtgtcatcggcaacttcatgatccagggcggcggtttcgagcctggcatgaaagaaaagaaagacaagcgcccaagcatccagaacgaagcggacaacggcctttccaacgacaagtacaccgtcgccatggcccgtaccatggagccgcattcagcctccgcgcagttcttcatcaacgtggccgacaacgccttcctgaaccacagcggcaagaacgtgcagggctggggctacgcggtattcggtaaagtcaccgaaggccaggacgtcgtcgacaagatcaaaggcgtgcagaccaccggtaaagccggtcaccaggatgttccggtagaagacgtgatcgtcgaaaaagccgagatcgttgggtgatattgctgatttcagatttgcatctggaagaggagcgcccggacattacccgggcgtttctggatctgctccacggccgcgcccgtggcgcccaggcgttgtacattctgggggacttcttcgaagcctggattggcgacgatgggatgacacccttccaacgctccatttgcgcagccctgcgcgaactgagcgacagcggcaccccgatttttatcatgcacggcaaccgcgatttcctgatcggcaaggcgttctgcaaagccgccggcgccagcttgctcaaggacccgagtgtcgtgcagctgcatggcgagcccgtgctgttgatgcacggcgacagcctctgtacccgcgacgtcggctatatgaagctgcggcgcatcctgcgtaacccgatcgtgctgtttatcctgcgccacctgcccttgggcacacgccacaagctggcgcgcaagctgcgcagtgaaagccgtgcgcagacacgcatgaaggctaacgacatcgtcgatgtaacgcccgaggaagtgccacgggtgatgcagctgttcggcgtgcgcaccctggtccacggccacacccaccgccccgccattcacaagttgcagattggcgaccaggcggccaagcggattgtgctgggggattgggacaagcagggctgggcgttgcaggtggatgagcaagggtttcagttggcggcgtttgattttgtgaacccgcaactggcactgcccggcgcataaaaaatgtgggaggggcggtgcgacgattcgacttgcccccgatnnnnnnnnnnnnnnnnnnnnnnnnnnnnnnnnnnnnnnnnnnatcgggggcaagtcgaatcgtcgcaccgcccctcccacattgaattgtatttcgatctttactgatcagtgcccggaagctgccggccccgctttggcggtaaacggcggcttcgccagccataccagcagcatcaaccccatgaacatccaccccagcaacgtgaagtaatccacggtggacatcatgtacgcctggctggtgaggatctggtccagctgcgtgtaggccttctgccctgccccaccgagcgcctgcaaggcatcgcgggtcgccgagtcgtaggtggtcatgttctcgctcatgtacgcatggtgctggtccgcccggcgaatccagatccaggtggtcagcgacgccgcgaagctgccgcccagggtacgcaggaacgtggccaggcccgcgccgtcggcaatctggtgcggcggcaggtcggacatcaagatgctcaaggtcggcatgaagaacagcgccacgccaatccccatgaacagctgcaccagggcgatgtgctggaagtccacctcattggtgaagcctgcgcgcatgaagcagctcaagccaatcgccaggaaggccaggcccgccagcaggcgcaggtcgaacttgtgcgcgtacttgcccacgaacggcgacatcagcaccggcaaaataccaatcggcgccaccgccaggcccgcccaggtcgcggtgtagcccatctgggtctgcaaccactgcggcaggatcaggttgatgccgaagaagcctgcgtaccccaggatcaacacgatggtgccgatgcggaagttgcggtaggcaaacagcttcaggttgaccaccgggtgtttgtcggtgagttcccagatgatgaacaccgccagggcaatcaccgaaatcgccgcgcccacgataatgaagttggattcgaaccagtccaggtcattgcccttgtcgagaatgatctgcaaggcgcccacgccgacgatcaagctcagcaacccgacgtaatccatcggctgataactggtctgcaccggacgtttcttcaactgcgaacgcaccaccatcaccgcaaagataccgatgggcacgttgatgaagaaaatccacggccagctataactgtcggtaatccagccgccgaggatcggcccggcaatcggcgccaccaccgtgaccatcgccagcaacgccagggccatgccgcgcctcgccggcgggtacacggcgatcagcagtgtctgagtcatcgggtacaacggcccggccaccaggccttgtatgacgcgaaaagcgatcagctcgggcatcgacgtggaaataccacacaggaacgaggccagtacaaacagcatcgtcgcccacaagaacagcttcacctcgccaaaccgccggctcagccaaccggtgagcggcaaggcaattgcgttgctcaccgcaaacgaggtgatgacccaggtgccctgctccgaactcacgcccaggttgccggaaatggtcggcaacgccacgttggcgatggtggtgtcgagcacctgcataaaggttgccagcgacaggccaatggtggccatcaacaggctgggtggcgtgaaggaggcgttattgctcatcagcgttgcacagccttgggcgcggcgaggctgttgtcatggatcaactgggtgatcatggcgtcggcctcggcgagttggcggtcatacacgttggtgctgaacgaggctttctgcggcgcctgttgcgccagtaccgggccgctctggtcatgcaggtcgaccttgaccagggtgctcaagcccacgcgcagcgggtgcttggccagttcttcggcattgatgtggatacgcaccggcacccgttgcacgatcttgatccagttacccgtggcgttctgcgccggcagcagcgcaaacgcgctgccggtaccggcgccgaggctgtcgatggtgccgctgaatttcacgtcgctgccgtagatgtccgactcgatgtccaccggctggccaatgcgcatgtcacgcagttgggtttccttgaagttggcgtcgatccacagctggttcagcgggatcaccgccatcaaggcggtgcccggttgtacgcgctggcccaattgcacggtgcgcttggccacatagccggtgaccggtgcgatcaaggtgctgcgcgcattggccaggtaggcctggcgcagttgcgcggcggcagcctgcacgtccgggtgggagctgatcacggtgtcatccaccagcgcgttggtggttttcagttgctgctcaaggttggtcagggcgtttttcgcggcagtcaggctgtcacgggcgtgggacagttcttcctgggaaatcgccccgccctgggccagggttttacgtcggttgaagttgtcctgggcagtctgcacgtcggctttctgcgcattgacctgggccttcatgccgtcgacgttgctgtacaaaccacgcacttggcgcacggtgcgcgccaggttggcctgggcactttgcaggcccactgcggcatcgttagggtcaaagttgatcagcacctggccttcgtggaccaggtcgccatcgtcggcgccgatgctgaccacggtgccggtgaccagcggggtgatttccaccacgttgccgttcacgtaggcgtcgtcggtgctttcgctgaagcggccgtagagctcgtaccagccccacacgccgaccacgacgaggatgacgatcagcgccaggccgatcagcatcactttgcgtttgcgtgggttgttgtctttgggttgttcggttgcgttggtgttttcggcagtggccatgacaaatacctcaaattattccgtgcgtgtagctggggtggccgctgccacgttgtcggcgctgtagccgccgcccagggcctgcatcagttgaatcgacagatcgatctgcgcggcattcagggtcgccagctgacgctgggcctgcagcaattgctgctcgatgctgagcacatccaggtagttaccgatcccggagctgtagcgctgcacgccggtgtcgtaggactgctgggcaatgtccgcggcatgttgctgggcctggatctgccgaccggtgtcgcgcagttgcgaaagggtgttgccgatatcgcccagggcttgcaccagggttttgttgtattgcgccacggccaggtcgtagtcggcgtcgcgggcgtcgaggtcggcacgcaggcggccgccgtcgaagatcggcagcgagatcgtcggcgcaatgttgaagaagcggctggccgagccaaacatcgcatcgcccagtaacgactcggccccggcgctcgcgctcaggttgaggttggggtagaagcgcgtcttgctggcgtcgatattgcggcccgccgattcgacccgccagcgtgcggcgatcaggtccgggcggcggcccagcagctcggccggcagcaccgagggcacggcgacagcgctgggtttcagcacgttgggccgggccagttcactgccacggtccgggcctttgccgagcagcacggccagggcgatcttggcgctttgcagttgtttctctgcgtcgatcagttgcgactgagagctggcttccaggctttcggtctgctggtactggtactggctgtcgatacccgaattcagccggcgtttgctcaggtcgagcatctgccgggtacgcttgaggtcatcgttggccaggtcgcgcacgatatgggcctggcccaggtcgctgtaggccttggccacgttggcggccagggtcaggcgcgcggcctgctggtcgacctgggcggcacgcgcttcgcccaacgcggcttcccaggcagcacgctggccgccccagagatcgaaggtgtagttgaagctggcgccgatattgcgcacggtcgagtaggcatcgccctgcccgcgtgggtcctggtctttggccaggcgtgagcggctcacaccggcgctggcatccagggtcggcaggcgcgctgcgtcggcggcgtaggcggcggcttcggcctggtgggcacgggcgctggccacttgcatgtcgggactgttttgcagggcttcccgaatcaagccatcaagctgcgggtcaccgaggcttttccaccagtcggcggtcggccaggcagcgctcgacagggtcacgccgctcaaggttttaccggtttgcaatgtgctggcgtcgaggcgtttgccttgggtgtcgaggccgctgtagttggcgcaaccggccatgttcatggccaccagcaccaggctaagtgcgcgtatgttcattctttacctacccgctggatgacgatggcgtcaccggcagctatcagaattttcttgaggatccgctccagggtctgcaactcgccgggctccagggcgccggccagttcgttcatcgactgggcgccgatgtgcggcagcatgtccgccaggcgctggccgtcttcggtgagcaccaagcgcacctggcgccggtcctgctcggaacgctggcgtgccagcaatcccttttgttccaggcggtcgagcatgcgggtcatggagccgctgtccagggacaggttgcggcacagctccgccggggtatccacatcgaactgggcgatgatgatcaacaccttgaactgcgcagcggtcacgccgtgcggctccatatgggtgtcgataatgcggtccttgagcagcgccgcgcggcccaggagcaggccgaggtggcagttgcgaaaactgtcaggagtgaagtgagacatcggaagtcaccttattactgcctaggcagtgaatgtgtgacaagatgttactgcttaggcagcgaatgtcaaatggaattattagcttgcttggtagttggcggatgagtggtggggttctaaggattgcctgatggggtgtgacgccttcgctgagtaatctgcgtagccttttggccagtcgacactctccttcccatgacttctttaaaacagtttactcgcctcgcggtcatcaccctggcgggcgcgccagccgcttttgcggctaattgcacagccaccatcaacaccaacgaagcccttaatttcggtgcaagtctggccagtggcagcctgacagttcccgctgatacgcccgacggcaccgtgatttaccaggacacggtgcaatccgctcaaaacagctggagatgcacgggctcttcgcaatacggcctggtgatgaaccctacgctaggctcggtcaccagcggctcgacctaccctatcggcaagaccgggctttcgttccgcgtctggatcgacactctgagtcgctatgagactgcaccgtttacgctcaagccggatggttacggcatcaacccaggctcggtgcgcctggaaatcgtcaaatcaggtacgctggcgccgcaggtcaagatagcggccggaaacctgggcagcttgaaagccgacgacctgttcatcagcaagtacaacctgaccaacccgctggtgctgaacgccgcctcctgccagaccccttccgtccccgtcgccatgggtgacgactatcagctctgggaatttcgcgacgcaggcgcaacccctcgcactgtccgcttcaacatcggcctgaaccagtgccagaccggtatcaacaaagtcagctattcactcaaagccaccacgcccgtcatcgacgcggccagaggtgtggtggcgctcaacggcggctccaccgccaaaggcatcggcctgcaattgatggatgatgccgggcaacccatcgcgtttgataccacctactccttcagcggtttcaccaccacgggcgccaacttcaagatcccgttgtcggcctcgtattaccgcttgcccaccggcaacgtcgaggccggcagcgccaacaccgaagtcacctttatcgtgaactacctgtagcaaactaaggatcgtctgatttttcctacgcccggccacgcctagagtgccgggatgcgattaaagaactatctccaccagatcagccccgtcctgtccacgccccatgccgcacgccgcttgttgcgcatttttgcgctggtgctgctggtgggcatgctgggcggtgtgtacagcttcctgctgtttacgttcaacaacgagatctctcagcggcgcagctacatgagcagcgccatcgccgaggcccatacctttttcaccacccgtgaagccctgctggaaagcctcagcctgtcggccacacgcaaggccgaatcgaacctggcgatgaacgatgaggaaatccgcctgttgctcggcaaaatcccgggtaagcaatggagcatctggctgacccagcgcatgcgcgacttcctgaaggccaagcagctcaacctgctgtatgtcggcaccgatgcccaggtgctgcggctgtacgatgcgggtcccgcggccgccggctttcccgcgtccatgctggcgcaactcaatgccctcaagcagcagaaaaccctgcaggaactctggctgactcacaccgacggtggccattcgcagctgtacatctttatccgcctggatgaacgcgacctgaactccggctggctcggcctggagatggatgaccgtgaagtctccaactccttgagtgaccacagcgccggcgagttcaccatgttcaatgcccagggcatgcctctgttcagcaacagccgcaacccgccgcccgggcagaacctgccgcacctgcgccagcaggacttcttcggctttgtcggcgacggctggctgcccgagcaattggtgttgcgcaaacaactgaagtcgtcggactggcagctcacctactccatcgacctgcgcgcggtgctctgggcgctatggccgcagatgctcggcgccctgctgttctgcctgctgaccatcagcctggtgggcctgctgacccgccgcctggaacaccgcttcatcacccccgccatccatcgtatccaggcgctggtggaaagcgagctgttcagccgcgacgtgatccagaccgcccccgtggccctgtgcgtgctgcggcgcaccgacggcgaagtggtactggaaaacaccctggcccaacaatggctcagccacgccggcgcagagctggggccgggctggattcgtgacgccttcgatacggacaccccctgccttaccgactacttcgagactgccgacggtcgccacctgtacctgagctgtgcacccacccgctacaagggggaagacgtgttgctctgcgccttcagtgatatcagcgcacgcacccagatcgaagcggcgctggaacaggcgcgccaatctgccgatgccgccaacgaagccaagacactgttcctggcgaccatgagccacgaaatccgcacgccgctgtacggcgtgctcggcaccttggagttgctcgcccggacccgcctggatgcccagcagaaaagctacctgcatgccatcgaaggttcctcggcgacgctgctgcaactgatttgcgatgtgctcgacgtgtcaaagatcgaagccggtcaattggccctggagttgagtgagttctgtgtgcccagcctggtgcaggaagtggtgcagggttacgccgcagcggcgcagagcaagggcttgcagctgtacgcgtgcctcgacccgcaactgccgtcgcgcctgatcggcgacgccagccgcctgcgccagatcctcaacaacctgctgagcaacgcggtcaagttcaccgactccggacgcgtggtactgcgggtcaaaaagctcagccgtgaaggcgaacgggcgtgcctgcaatggcaagtctcggacaccggtaaaggcatcgcccaggaagaccaggcgctgatcttcgagccgttctaccagaccgaaggcaacccccatgtgatcgccggcaccggcctcggcctgcccatttgcctgcgcctgacccacttgatgaacggcaccctgcgcatggtcagcgagccggggctgggcagcagtttttccctgaccgtgccgctggagcaacccactggtatcgcgccgtcgctgctggcgcaggaggtggtgtatgtgctctcgcctgtgcgcgaactggccgacagcctctgcggctggctgcggcgctggggcgcccgcgcgcaggtcggcccgccgtccagcgccgagctggccccacccgcggtgctgctggaactggttgagcgcagcctggacacgccctggcacggcccacgggtcctcgccagcatcgatggcgcccacgagccgcagttcagcgaagagggctggcaggtcaacctcaacgacctgaacgcgatccaccaggcggttcgccacgcccagaacggccaggccgcgccggcccaggcacgttgcgaacggcgcgacctgcaccccttgcacctgcatatcctggtggccgaggacaatgtgatcaaccagttgatcctgcgcgaccagcttgaagaactcggctgcaccgtagaattggccagcgacggtgaagaggccttgtcgcgctggcacgaaggcgccttcgacatcgtccttaccgacgtcaacatgcccaggctcaatggctacgaactggccgaagccttgcgacgcctgggctgcaacaccccgatcatcggcgccaccgccaacgccctgcgcggtgaagatgccttgtgcctggcggccggcatgaatcactgcctggtcaaacccttcacactgcgagccttgttcactgccctggctccctacgcacgagccacccatgaagccctgtagcattttgatcgttgaagaccacccgtttcagcacctgtatttgcagaacctgttcagcgagttgggcgattttgacgtggtctgcgccagggacggtgaagccgcgctggcctgcctgaaacaacgcgacttcgacctggtgctcactgacttgctgatgcctggcatggacggcgtgcaatttatccagagcctggccgctcaaccctcgcggcccgcgctggcgatcatgagtgccgcatcacgccgcatgctgatgggtgcgagcctggtggcgagcaacttgcaagtgaaggtgatcgggttgatttccaagccggtgaatgccgccgccctgcgctgcctgatcgaccagttgcaggcgctgcgccaagtcgcaccggcccagacccagcccggcatcgattgccaaagcctgatggacgccctggacaacggtgaactgcacgcctggttccaacccaagaaagccctgaacaatggtcgcatcgtcgcggcagaagccctggtgcgctgggtgcaccccgagcatggcctgttgctgcccggcgtattcctgccggcattgatcgcctgccacctggaagaacgcctgttgtggtgcgtgttgaaacaggcgatggccgcccaagccatgtggcgccaacacggctatgacatcccggtgtcgatcaacctgcccacgcacctgctcaacagccacgacctgcccgaccgcatcctcgcgttcgtgctggaacaccagggtttgcccgcacgcctgtgtttcgagctgatggagtgctcggtgcccgatgacatcagcaatttctacgccggcgcctgccgcttgcgcatcaagggattcggcttgtcccaggacgatttcggcaagggctacagctcgtacatgaacctggtgtcagcgccgttcaccgaggtgaagatcgaccgtgcgctagtgcagggctgcaacgccaacgaagaattggcccaggccctcaccagcatcgtcagcctggggcgtcaattgggcttgatcgtggtggccgaaggtgtagaaaccgcgcaagaacttgcgctgttgcgtaagatcgactgcactcaggtccagggtttcctgatctcccacgccgtctctgcggatcagttccagcaattgctgacccacgacgggccggcgagcgcctattgacccggctgccgggtgtggaacaacaccgttagcttgcgaggtcaccgcgtcatgcatcaccccaatgccttcctggagaaactcaccagcagttcactgcgcctgaacaaaggcttgctggtactgggcgcattggcggtgctgctgctgggtatcagctacctgggagtgcagcgcatggtcaaggagcagcatgaaaccctgcaattccacttcgcccggctgatggaaaatatccacgagcaggaagccttcctgcgcgatgtctcgcggggcagtctccagggcgaactcaacccttcggccctgctcccacccgttgtgcaaaagccgctgcccgaagaagggccgaatatctatgagggtcgcgggctaccgttttccctgccctacagcttgaaaatcaacccggacaagatcaccaccgcccaataccccaaggtgttcgctctcggcacctacttgtcggcttactacagcgcgttctgggccgcctcccactatcagtcgccccaggtgatggtgatcaacggcccggacaacttcgacatcagcgtgcccgccaccggccggctgcgcgatggcggccaggtgccggtcggcgcgctgctggacgtgctgacccagttgaacgcgcgcctgcacgcacagaattcgtcgctggcggatcatcaggtgcactgggaaccctacgaccccacgcccgatgacaacgctgcgcccgtgctgctgggctatgtcgacatcaacctggcctcgaccgcgctggccatcgacggcgccaacacctgggtggtggtggcttcgctgctggacctggccaaggtgaataacatcgagcgcttgatgcagtggtcgatctacgacaacttcaccttgatcacccctgccggggttgtcctgaccggtgcagtgaagcccggccaagtgttggccgagggcgtaaatgtcacccgcgacggcctggtgttcaaactcaccagccagggcgagcaggcgtggacggcgatctacgtgatcagcctgcaacgcttcctcgactacgcgctgtggccattgctgtgtctgctggccgtggtgctggcgatgctgggctgcggccgcgcgctcaaccgttggtacacggcgcgggtggtgttgcccgcccatcaggcccacgccagcatcgctgagagcgaggcgttcagccgtgcggtcatcgacactgcgccgaccggcctgtgcgtgatccgccgcagcgatcaccatgtgctcctgcaaaaccaacgtgctcagcaatggcaggacgcacgcgccttgttcgacttgctcaaacagcagccgcacaccacgccgggccaggccgaccttgaaagtggcggccgtcacctgcacgtggcgttcgtgcccacgcgttaccagggccaagacgcgtggttgtgcgcggtgcacgatgtcactcggcatatcgaagatgccgccgccctggaagaagcgcgccaggccgccgattcagcgaaccaggccaagagccgcttcctcgcgaccatgagccatgaaatccgcacaccgctgtatggtgtgctcggcaccttggagctgctcggcctgacctccctcgcgccacgccagcaggattacctgcagaccatccagcgctcgtccacctccctgttccaactgatcagcgatgtgctggatgtgtcgaagatcgaagccgggcaaatgaccctcgaactccaggacttctgtccgctggaactgaccgaagacagcgtgcgcacctacagcgccttcgcccgcgccaagggcttgcagttgtatgcctgcatcgacgcgaatctgccggaccgactgcgcggcgacccgcagcgtatccgccagatcctcaacaacctgctgagcaacgcgatcaaattcaccgattacggccgcgtggtgctgcgtctgcgtgtcctgcaaaccagcgatgatcaggtgagcctgcaatggcaggtcagtgactccggcgtgggaatttcccaggcgcagcaacaccagctgttcgaccccttctaccaggccgaagatgccaccagccaggccggtgccggcctgggcctggcgatctgcaaatggctgtgcgaactgatgcacggccagctgaatgtggtgagtgaacccggcctgggcagcagctttaccttgcaggtcgcattgcaggtcgttcccggcagcctcaccgattgcccgacgttcagccccggcctgccgcctgtctacgtacgggcacaggaacccgaacgggcgcagcacctgatcaactggctcaatcgcctggggctgtccagccgtgcgctgtcagccgagatgccggccaacgcgctgctggtggatttcgcccaggacctggcatggcccggcccgcgcatcatcgcctccgagggcgggcctgacccggcgcaaccgtgcggtgccgactggagcgtcgatgccgacaatgcgcgcgccattgcctgggcgatccaccgggcgcagcatggcgccgaagccggcccacaccgcgtaccgtccgccaaggcgcagccactcaacctgcgggtgctggtggccgaagacaatgtgatcaacgcggccattatcaaagaacaattggaagccctgggttgccaggtggtcgtggctggcaacggcaaacaggcgctgatgcagtggctgccgggacgcttcgacctagtgctgaccgacgtgaatatgccggtgatgaacggctaccaactgaccgaagccttgcgccgacaggacaccacgctgccgattatcggggtgaccgccaatgccctgcgcgaagagggcgagcactgtgccgccgtcggcatgaacgcgtggatggtcaagccgctgagcctcgccgccttgcgggcgcagttggaacaacactgcaaggtcgaaatgccggctgtcgtcgagatgccgccgttgtcacccaggatgcgtgagctgtttgtcaccacgttgcgccatgacgtacagaccaccttgaccgcgctggacaatcaggacgccaatggcgcggcgcaacaactgcacagcatggccggcgccctgggtgcggtgcagctcggtgacctggccagcgcctttgtcgcgctggaactgcgcctgaccggcatggccgtcacgccggccctggccttggaagtacgacagcacctggcgcggctcagcgcattgctcgacactcttgaataacttcactctggataaaaaacccatggaaaccctcaacgtagtcatcgcagacgatcaccccatcgtgctggtcggggtgcgggaactggtcgaacgtgatgagcgctttcgcgtggtgggcgaagccgtgtgctccaacgaactggtgaagttgctggaaaacaccgaggtggacctggtgatcaccgatttcaacatgccggcggactcgccctacggcgatggcctgaagttggtggagtacctggttcggcacttccccaaagtgcgcgtgctggtgctgaccatgatctccaacccgctgatcctcacgcggttgcaggagctgggtgtactcgccgtgatccagaaaaaccagctgcacgtggaaatccaggctgcgctcaaggccatcgcgcgcggcaacccgattcgcagcaaggggccgcagccgacctcggtgctggagtcatttgatctcgaccagcgcttcacccggttatcgcccaaggagcacgagattctgcggctgtttgtctccgggcaaagtgtcaacgagattgcccgtgggttgaaccgcagcgccaaaaccatcagcacgcaaaaagtcgcggccatgcgcaagttggaagtcagcagtgaccaggacttgctggcttattgcatagagcgcaacttgtttaactaacacccacttctagggatcgtctgatgtccccccccaaggcctgcgccttattgtgttgttttaaccccaagcatggaaaaacaacatgaaacagctctctcgcgcactcttggctctgtcggtatttgccgcagttaatacatttgccgccggtgaacccaccgcaccaaccaaagccggtagcggcaccattagtttcaccggcagtatcaacaatgatgcctgttccgttgaagggattggcctgaacaaaaccatttcgatcaacatgggcgaagtgtcgatcaaggacatgggcaccgcgaccgcgccaaaaggcagcggtaccctgagcgccgagaacttcgacatgaagatcagctgcaacgccggcaccaaggtggcaatgatcttcgaaccgaccaaaggcgcaggttcgggcatcgtcgccggcaccaaagtgctgaagctgatcgacggcctgggcgccgccaagaacgtcggtatcgccctgctggacagcaacggtgcgttgatcgacctgagctcgccgaccaccgcgaagatcgaaaacaccctgcaagacagcaacaccacgctgaaattctcggccgcctacgtcaccacagccgacgctgcgactgccgtagccggtcgcggcgacgccaccctgccgttcaccctgcaatacgaataaccccagcgtcgcggggccttcgggcctcgcacactcttcgaacgtagcggtagccatcatgttatttcgtcattctctatccctctgcgcgggcctgctgggcctgttcgcggtcagccaggccacggccggcatttcgttgagcagcacacggctggtgttcgacggccagcataaagaagccggtatcacggtgcgtaacaacggtgaagacgtgctgatccagtcctgggtcgataccgacactgacagcacggtgccgtttgccgtgaccccaccgctggcgcgggtcacggccaatgagcaacagctgttgcgggtgatttatgccggcgcgggcctgcccaccgaccgagagtcggtggtgtggctcaacgtacaggaagtccccaaggcatcgaaaacccagaacaccttgcagcttgccgtgcgccagcgcatcaaggtgttctttcgccccgccggcttgaacaacaacgcttacctggcaccgaccgaactgctttggcagttggccgagcacaacggcaagcacgtgctgcgggttaccaacccgggggtttatcacgtgtcgattgccgacattaccctgcaagccggtgccgtcagtgaacacccgttcgattcaatgatgattgcgccgggtgaactaaaagagttcaaccttaaacaacttaattccagccagccggcacgcttgatattcggcagcattaatgactatggcgcacaagaccgttattccacgcaactggttaacggcgcgccaacttcagccagtttgaacacagaatcaccataacgcgcctgccgttcgcgcagccgcactttcactgtatttctcttcgctccgttagttcgtatcggaggtgatatagggttcctgcatgtttttattcaagcgcgatggattggcgccgttattgattgccctgggcttcacttcagtgtgccaggccgatggcgacgaacaattcaatacttcgtttttgcaaggtgcggcggctgacgtcgacttgcacacactgctcgccagcaacagcgtgctgcccggcaattaccgggttgacctgtacggcaatgaaaccctggtgggtcggcgagatatcgactttcgccgcaacccgcaaaacggcaaggtcgaggcctgcctgaccctggagatgctgcagcaagtgggcgtcgatatcggcgcattacaagccagcggcaagctcgtcgataccgacccgaatgcctgcctggacctgcccaccttgatcgagcatgccagcgtgcgctacgacgtaccgcgcctgcgcctgctggtcagcgtgccgcaacgcgccatggaacgcgggcggcgtggctacgtcgaccctgcgctgtgggacgaaggcgtgcccgcggccttcgtcaactaccaactgagcagcaaccgcaacagcaccgatgccgataccacgctctcgaacaacctgggcctgcgcaacggcatcaacctgggcgcgtggcgcctgcgcaacgagtcgaacttcaacagcagcaccgaccgccccagtacgttcaagagcaaccgcacctacctgcaacatgacgtgacggccttgaagggccagttcagtgccggggatattttctcggacaccgacctgttcgacagcgtgcgctatcgcggcctcaagctggcgtccgacgatggcatgcgtgccgacagcgagcgtggctacgcgccgatcatccgtggcattgcgcaaacgagcgccacggtggaaatccgccagaacaattacatcctctacaccgccaacgtgccaccgggcccgttcgagatcagcgacatttaccccagcggctccaacggcgacctggaagtgacggtgatcgaggctgacggccgtcgccgggtcacggtgcaggcgttttccagcctgccgatcatggtgcgcgaaggccagttgaaatacagcctctccgccggccagtacaacagcaatgacgacgggcaagaaaacccgcagtttgtcagcagcaccctggcctatggcatcagcagcaacctgtcggggatcgtcggcgtccaggccacgcaggacttccaggcgttgtccgtgggggcaggacgcaacacgtcgatcggcgcggtatcgctggatgtgacccactccgtcagccgcaccttcggccagcaggtcacgggtaacagcgtgcgcgcgttgtatgccaagacctttaccggcaccgacaccaacttcaccttggcggcctatcggtattcgaccgagggctatcggaccctcaccgaccacgtcgaggaactcagcaatgagggccagaaacgcaccggcaactccaagacccgcaccgacctgaccatcaaccagagcctgggccgcaaccagcagttcggcagtgtctatgtgaatgccagcgaccagcgctactggggacgcggcggctcgcaaagtctgtcggcgggctacagcaactactggggcgacgtgagctacaacctcagcgccacgcatacccaggacgtgggcaactacggggcatcgaacaacgacacgctgatcaacctgtccgtgtcctttccgctgggttcaaagccgcgcgcgccgagggcattcatgtcggccagcacgcaaaaaggcagtgactccacgcaactgggcgtcaacggctacctgaccgaaaacagcgacacctattactcgctgcaagccggtaacagcagcacgggcggtagcaccggttcggccaacctcagcacccgcacctcgctgatggacatcagcggcggctacagccagggccgagggtacagcgcgcagaacctcaacgtggcggggtcggtggtagcccacgcaggcggtatcaacctgggccagaccgtgggcgagacctttgcgctggcgcacgtcgacggcgtgcagggtgtgaagatcggcagcttctccggggcaaagaccggccgtaacggctatgcggtgatccccaatgcgcaaccctaccgcgtgaactggatcagcctggacacccgtgacctgggcgctgacattgaaatcgataacgccacccagcaggtcgtgcctcgccgtggggccgtggtagtggcccgctataccagcaagagcgggcggcgtgtgcagttcgcgttgttcgacgcgcatcacaagcccatcccgtttggtgcgtcactggagagtgttgcgggcaagcagatcgcgatgtccgaccctagtggcaaggcattggcattgatcgaagaggatgccggtacgctggtgatcaagtggggtgagcagcactgccaggcgccgtatacgctgggcgagcgcaacaaggcgctgaactatgagcaggtagacctgacctgcttgccacaacgctaaaaacaccagagaacccatgtgggagggggcttgcccccgattggggtgtatcagccaacttatctgtggccgacccaccgcaatcgggggcaagccccctcccacatttctgtacctgtgtggcttagaaatcgcgtttatagaagatatccaatgagctggccacaccgctcgccacttccaggtacaccttcttgctcaacaggtagcgcaaggcaatggtgctggccggttcgaacacgcctaccccataccgcaggctgagtttctcggtgatcttgccgctggccaccacggcggtggtgttgccgctgccctgggtgtcgagttcgaagtcctggatgcccaggttcttcgccaggtccgaggtgacccccgcgctgcccatcaagccgaggcccagcgcagcctgggccagcatgttgttgtcttcaccggtggtgctcagcggacgccccagcaccaggtaggacagcgcttgttcctggctcatggccggttcggagaagatttgcgtggtgggctgttccgcgctgccgctgaggcggatacccgcgaccacatcgccggtcttgcggatcgcttcaatatccaggaacggttgatccaacggcccggcgaacaacagccgcgcacgccgcacatcgagcttctggccgtaggcgcggtagcggccgtcgttgagccatagctcgcctcgggtgtcgaggttgtcgccgatgtgcacctggccctggaccttggcggtgaggccgaagccggagaagttgagcttgtcttcgcccacaaccacgttgatatccatggccattgccatcggcggtttgccctcctcggtctggctgccgatgatcaccgtgtcatccgagaccttgaccgtcgacggtggcagctcgcgcacggtgatgtcgccgcgtgggatatgcacgttgccggcgatggccaatttgtcgttcttcaggctgattttcaggtccggtgctacttccagcaccgcgtaaggttcgaccgtgaccggcaactgcgagccttgcaaactgaggtccaccaccagcgccttaccccagtcgacctgccccttgaggctgccctgcccggccttgccactgcgccaggcgccgttgagctgcacactttcgccggcaatcagcgcctgcacattcaggccttccaggctgatgggcagttccggaccggagatctcaccgcccaccaggttgacgttgccgttgacctggggcgccagcaagccgccggacagacggccgttgccgttgagcttgccggtgagtttctccaccatcggcacaaacggccgtgctacggcaaggtcgaggccgacgaggctaaagttgccggttatgggtttgttcttgggtaacgggttgatctgcgcctgcaacaacagttcgccgagcttgccgccctggaagttgagctgagtgtcgatacgcttggggttgagggtggtttcaagtttcagggtgttgtagggaaaatccagccactggtccttgtccttgacgcgcaaggtgccaccactggcgtccaccatcaccacgcccttggggccactggccggcaggtccagttgcaggtcggcattgagcttgccctgccaggcgaaatccttcggcaggaacgccgccaggctgtcgatggggaattgcttgaggtggtaacgcagcttcggctcgggcatcaggcgctggtcttcgccgcacaggctggccggcccggacacccagcagtgcgcggcaaaggtcagcctgccatcagccatgcgttcgatcctggccggggcttgcagcttccagtcctggccaccggcttggacgtcgccactggccaagcgcccgcgccagttgcctttgtcgaggttgccgtccaatgccagggccagcttgaccagcgggccgaccaggtcgagctggaccttctggttcttgatatcgccctgggcactggcggtcagggtgccgacctgggtctcgccggattggataccgctgcccttcaggtcaatcttggcgcgctgggcactgtcgagactggcgtcgagggtgaggctttgcaggcggttatcggcaaacgccagttgctggcccttgaggtcgagtttgccttggggcgccttgaggctgccagccacgtcgagtcggccattgacctgcccgcgcaactgcggccacaactgggccaggcgcgtcagtttgatgtcgatctgcccggccaggcgttgttgcaggctgccactgccgttgatgcggttgtcgcccaggcggatattcaggttggccagggtccactgctcacccgcgccttcggccttggctgccagcacggcggtttgcccgcgcaggcggcccttgaggtcgaggtcggcattcagcttgagctgctcgtgcttgaactcgcccttgctgcgcagcggcccggccagggtgccgggcaattcggcgacccagtacgccgggttcagcgcagacaggtcgagtgccgtgtcccaggcgatgccatcggcgaattgcagattcaggtggccctcggccttgccctggccggcggtgagtttcagctcgggcaggaagatttgcttgaggtcgccactgaacggcgtgaccacgttgaacttgcctgcggggccgtcgaggtcggccttgaggttgcccaggtagttgccatccttgtaggagatctcgccattgaatgtacgcagtgcaacttggggctcatcgatgacgggataaaggcgatgccaggggaagtccagccagtcgaccttggcgtcagcgctgaagccttgttgccagtccaggttggcgctgagtttcaggctttgcttgtcgtcgccatacaggtcgagtttttcgatctgcgcccctttggcatccacgcgccccagcaacaacaggcttaccgggctcttttcggcaggcagcgacgccttgcccgagagcacataaccggttttcaggtcgcccttggccaggagcaccagctcattgagttgcagggtgtcaggcaaaccggcatccggcttgaacgcatcggacttgatcagcacttgtcccggcagatcttctgccagcggttgcaactgcgccagcaggctgccgtccaggtagccatggctatcgccgttgacggtgagggtcttgagcaagtcgccttcgactttgaggccaaccgtccactgttcaccaccgggcgcgtaaggcaggctcaagttaccgctggcgttcaacggccagtcgccggtgggttgcagcagaccagccaggtccagcaccaggccatcgcgttgcagatgcaccgaatcaatttgcatgcccgcggcggtccagtgcgccgccagttgcaggcccttgagttcttcgctgccgttgaacagcaggctgccgacgcgaacatcgcccaactggatggccagcggcagtttcagatcgggtagttcgatcgggccgctgctctgctcggtactgggagggaattgcaggctgacttgctcgacatccagttgattgatgcacagggtcatgcgcaacagacacgccggcgaccaatccagcttgggcgcctggagttcgacacggctgctgtcctgctgccacagcagatggtcggcgctccactggccacccaaatgcccctggaaattctccagggtcaaccccggcacgcggcccaatgcccagcggctgcccgcctgggtgcccagcgccgtccacagtgctagcaacaacacggcaaggctggccaccacggccagccccgctattttcacaccacgcatcacagctcaggccccatggaaaagtgcaatcgaatgccgcccgggtcttccagggcatgggccaggtccagacggatcgggccgaccggcgacacccagcgaataccgacgccgacgccggttttcaggctgggcaggtccagattgttgaaggagttaccctggtcgatgaaggtcgcgatccgccatttctcggcgatggaatattgatactcggcgctcagggccaccatgtagcggccaccaatacggtcgccgcgatcgttctccggcgacagcgtctggtactcgtagccgcgcacgctctggtcgccaccggcaaagaaacgtagcgacggcggcaccgagttatagccgttggtggcgctgccgcccacctgcgcacgggccaggaagcgatggttgtcccacagcgtcgtcaggcctttgaccatggccgtgccgtaaagcaggttggtatcggagcccaggccttccttggcgactttggtgtcgaattgcaggcggtagccgttgtgcgggtcgatacggttgtcactgcgcaggtaggagtagctgatccctggcatcaccaggttactcaggccggagtcattgcccaggcgatattcttcacgctggtacttgagcgaaatcacccgggtccagccgctgggcagcttgctgtgccactcggggcccacggtgagcaatttactcagggtgtcggtgttggcgatctcttcgttctgatagccaccggcaaagcgcagtttgtcggtgagcggtgggtccagtggaatgtcgtaccacaggccgacgttctgtcgcggcgccgacagctcggcttcccaaccatagctatggccctgggggttgacccagtggcgggtccagttggctttgccgcgcgggccgacgtcggtggagaaacccaggcccaggcccatggtgcggggtttgcgggtctccaggcgcacggccaccgggatgatgtcattggttgaagccgccggggcggcgtccacgcgcacgccttcaaaaaagccactggcttgcaggttctggttgagttcggcgatcagttcggaatcatagggcgtgccgcttttgaacggcaccatgcgttgcagcagctcttcgtcaaacggcgtgtcgccggcaaagctgaccttgcccaaggcgtaacgcggaccgctgtcatagatgagttcgatatcggcgacaccggccttggggtctaccgctagtttctggcgggtgaagcgcccattgaaaaaaccgtagcgcgaggcctggttctggatcaggcgcttggcgtcttcgtaatggccgtggttgagcacagcgccggccttgaggtcgttgctgacgggcacgcgaaaggtcttgaggtctgcggcggggccgtcgacccgtatggtcacgttgcgcaaatgcaccggttcgccggggtcgatggtgaggatcaggcgcgggttcttgccgcctttcacctcactgtcgatttgtggctgatagaagccaagggcctgggcggctttgcgcgcctgctcctcggcgccacggctgaaccgcagcaaggcctcttcatcacgatcgcccaccccgccgatatagccttcgatgttggctttcaacgcgtcgtttgagggtttgatccgcacgtccagttcgctttgcgccaacgcgccgcagcttgtgaacagcagaatcaagccgctggtaaatcttcctggaaacttcataggcgcggatgctacacgagcaagggagactctttgaactcggatttatctgaataattctggattaagccgttgcagcatgtaacgactgcggattcggatggaaaaacacatgctcgaggaccgggcctaccgccacttcaccgatttcctcgtagccctggcgtttatagaactccagataacgtgaattccccgtgtccagcaccacaccggacgaatgcgggtcttcggcacaccaattgtgcacggcttccagtaactgctcgccgtaatgcttgccctggaattgcgggtggatgcccagcaacggcagcacatgcaccgactcactgggcaggcacgccagcaccgcgtgatggtagtcgaggtaacgccgtgtaccgcgcacgccggtactcagccacatgcgcagttgccaggcccagctctcggtgatgcccaggcgccgctgcggtggcgcgatcagggcgatgccgatcaggcggtcattgacgaacaaaccaatggccggcagtttctgaaagaagtgctgcttgaccaactcgcgcacggtggcgcgtacccgttgttcataaccaggacgctcggcttcgaagatgtaggcgaaggtcggctcgtgccgataggcctggtacaacagggatcgggcctcgcgggaatagccgctgttgagcaggcgaatttcagcaattgcagttgtagtgtccggcataccgtcaatctccctgggcgcggctcaaaaggcagcgttcttatgggtacgaacctacacagcacgagtcgttcccagacattagcagtgcatgtgccctaccgccacgctggcccccgtccgacttgtccgctagcatcgcccttttgccagaccggactgccgaccatgaaaatcgtctccttcaatatcaacgggctgcgcgcccgcccacatcagttggcggcgctgattgaaaagcaccagcccgacgtgatcggcttgcaggaaaccaaagtccacgatgaccaattcccgctggctgaggtacaggcccttggctatcacgtgtactaccacgggcaaaaaggccactacggcgtcgccctgctgtcgcgcaaggaagccctgagcgtgcacaaaggctttgccagtgacgaagaggacgcccagcgtcgctttatctggggcaccttcgccgacgagaacggccacccagttaccatcatgaacggctatttcccccagggcgaaagccgcgaccaccccaccaagttcccggccaagcagcgcttctacgaagacctgcagcaactgctggaaagccagttcagcaacgaccaggcgctggtggtgatgggcgacgtgaacatttccccggaagactgcgacatcggcatcggcgccgacaacgccaagcgttggctcaagaccggcaagtgcagcttcctgccggaagaacgcgaatggatggcccgcctgaaaaactggggcctggtggacagcttccgccacctcaacccggacgtggccgaccgcttcagctggttcgactaccgcagccggggctttgaagacgagcccaagcgtgggctgcgcatcgacgtaatcctcgcctccaatggcctgttggcgcgggtcaaggatgccggggtggattacgagctgcgtggtttggaaaaaccgtccgaccatgcgccgatctggctggaactgagctgatcacaccctgtgggagggggcttgcccccgatggcagtgggtcttcagcccatctatagctgacacgccgctatcgggggcaagccccctcccacatttagccttgcggcgcgtacgtcatatttatgcaacctgtctgacttattctcgcggcaccccctttggcttgagaaggtgccggcatgaggctgcgcgttctgttactgctgactgtttttcccctcttcgccgtttccgcctccctgcccgttcctgatcaaggccctgctttgcgcatccagggctccaataccattggcgcggcgttgggcccggcactggtcaaggggctgatggagcatcagggcttgcaggcggtgcacaacgaaccgggcgaaggcgccaatgaacagcgtgtgatcggcaagacgcgccaaggcaagaccgtgaccatcgaagtcgcggcccatggttcgagcaccgggttcacggcgctgaaaaaagccagcgccgatctggccgcctcgtctcgcccgatcaaggacaatgaactggtcgaccttgaacccctgggcgacctgaaaagccccgaagccgaacaagtgattgccatcgacggcctggcgatcatcctccacccgcagaacccgttgaacacgctgaataccgagcaactggcgcagattttcaatggtgaggtcagtacctgggaggcactgggtggagtgggcggcctcattcatgtgtacgcacgggatgatcaatccggcacctacgacacgttcaaggaactggtgttgcgtttgcgtggcaagccgcttgcatcgggtgccaagcgcttcgagtccagcgagcagctgtccgatgcggtcagccacgacccgcagggcatcggctttatcggcctgccctacgtgcgccaggccaaggcggtggcgattgtggacggcgactcacagcccatgttgccgctcaacagcctgattgctaccgaggattacccgctgtcacgccggttgtttttctacctgccgccgtccgggcgtaacccgtgggccaaggcactggtggactttacccagggcaccaagggccaggcgattgtggccgccaacgggtttattgcgcagcaggtgcaggcgatcgccgtgcaaccgcgcccgtcgatgcccgaggactaccaggccatcgcccgcgaggcccagcgcctgacggtgaattttcgctttgaagaaggcagcgccagcctcgacaacaaggcgcgccaggatctgcagcgggtggtggcctatctgaaacaccacgacaagttaaataagcaggtgacgctggtgggctttggcgatgccaaggatgacccgcagcgcgccgcgttgctgtcgaagctgcgggcgatggcggtgcgccgggagttggtcaagaacgccgtggtgctgcgcgatatccgtgggtttggcgcgcagatgccggtggcggcgaatacggcggatgaggggcggatcaagaatcggcgggtggaggtttgggtttactgaagactgatggagcttcattgcctgatccgactgcatcgggggcaagccccctcccacattttgatctgtgaacacatccaagtgtgggagggggcttgcccccgatgcaggcgacccgctgttactgcccgctgcgcatcagctctttaggcacatacttgccaatctcgaacttgccgatggccgcccggtgcacttcatccgggccgtcagccaggcgcagggtgcgttgcatggcgtacatgtaggccagcgggaagtcgttggacacgccggcaccgccatggatctggatcgcgcggtcgatcaccttcaacgctacgttcggcgccaccaccttgatctgggcgatttcgcttttcgccactttgttgcccacggtgtccatcatgtacgccgccttcagggtcagcaggcgcgccatgtcgatctccatgcgtgagtcggcgatcttgtcgatgttgccgcccaaccgggccagcggtttgccgaacgcggtacggctgaccgagcgtttgcacatcaattccagcgcgcgctcggccatgccaatggagcgcatgcagtggtggatacggcctgggccaaggcggccctgggcgatttcaaaaccgcggccctcgccaagcaggacgttctcatagggtacgcggacgttgtcgaacagcacctcggcgtggccgtggggcgcgtcgtcgtagccgaacaccggcagtgggcgcacgatcttcacgccgggagcgtccaccggcaccaggatcatcgagtgctgctggtggcgtggcgcatccgggttgctcaggcccatgaagatcaggatcttgcagcgcgggtcgcaggcgccggaggtccaccatttcttgccgttgatcacccactcatcgccctggcgttcggcacgggcggccatgttggtagcgtcggaagaagccacgtccggctcggtcatggcgaacgccgagcggatctcgccgcgcagcagcggctccagccagcgtcgcttctgctcttcattggcgtagcgcaccagcacttccatgttgcccgtgtcgggggcggagcagttgaacggctccgggcccagcagggaacggcccatgatttcagccagtggcgcgtattcgaggttggtgaggccggcgcccagttcggattcgggcaggaacaggttccacaggccttcggctttcgccttggctttcagctcctccatgattgcggtgggctgccagcggtcgccttcgctgacctggcgttcgaacaccggctcggccgggtaaacgtaagcatccatgaacgcagtgacacgttcacgcagttcctgaaccttgggcgaataggcgaaatccatgagcagctcccttctctgagaggttgtttaggtcatgcaatcgatgctagaacagcgttgataatttacctagcctattctcggcgtgtattaacattcatcaccgatatatgatcgacgtatggccacctaacaataagagcgctgcgaaatgaatctgagcaaggtcgacctcaacctgtttatcgtctttgatgcgatctacaccgaagccaacctgacccgcgccgggcagattgtcggcatcacccagccggcggtgtccaacgcgctggcccgcctgcgtgagaccttcaacgacccgctgttcgtgcgcaccgcccagggcatggtgccgacgcccatggcgcagaacatcatcggcccggtgcgcaatgcgctgtcgttgctgcgggtgtcggtgcaggaaagccgcatcttcaacccgcagcaggcggccaagacttaccgcatcagcatgaccgacctcaccgaggcggtgatcctgccgctgctgttccagcgcctgcgccgcctggcacccacggtggtgatcgagagtttcctgtccaagcgccgcgaaaccaccaaggaactggccgccgggcgcctggattttgccgtggatgcgccgctcaacaccgacccgcaggtacgccacgtcaagctgatggaagaccgctacgtgtgtgccatgcgcaagggccatcccatggccggcaaagacaagctcacgctggatgactacctgtcgctgacccatatccatatctccagccgccgcaacggcctgggtcatgtggacctggcgctgggcaagatgggcatccagcgcaagatcgccctgcgctcccagcattacctgatggcctcgcaggtgctgcagcagaccgacatggtcatgaccgtgcccgagcgcttcgcccgccgccatgaactgcactggttcaacctgccggtcaacgacgtgccgccggtggaaacccacctgtactggcacgaaagcaccgaccaggacccggccaaccgttggatgcgcgagcagatgatcgagttgtgccagcaggtcaccgcccacgagaagaaactcgataaacaacaggcgtgaggttgaagcgccggccctgtgggagggggcttgcccccgatgggtcgcgcagcgacccttgacgtttacgtcaacctgccagtagcttaacgccaagacctccttgagcgcccccatgagcaccacctacagcatctccgacctcgcccgcgagctcgacatcaccacccgcgccattcgcttctacgaagaacaaggcctgctggccccggaacgccggggccaggagcgcatctactcggcccgcgacaaggtcagcctcaagctgatcctgcggggcaagcgcatcggtttttccctggccgaatgccgcgagctgatcgaactctacgaccccaccagcggcaaccacgtgcagctcaacagcatgctggcaaaaatcgccgagcgccgtgagcagctggaacagcaactgctggacatcgaacagatgaagctggaactcgacaccgccgaagagcgctgcactcaggccctggcccacaccctgcgccaggccgaccactgatcagaaggtaaccgccatgtccctcccctcacacgtacgcctggtggaagtcggcccgcgcgacggtttgcagaacgaagcccaacccatcagcgtggcggacaaggtccgcttggtggatgcattgagcgcagccggcttgcgctatatcgaggtcggcagtttcgtttcacccaagtgggtgccgcagatggccggttccgccgaggtgtttgcgcagatccagcgcaagcccggcgtgacctatggtgccctggcgccgaacctgcgcgggttcgaggacgcactggcggcgggcgtaaaggaagtggcggtgtttgccgccgcgtccgaggcgttttcccagcgcaatatcaattgctccatcagtgaaagcctggagcgctttgcgccgatcatggcggcggccaggcaatacggggtcagcgtgcgcggctatgtgtcgtgcgtgctggggtgcccatacgaaggcgagatcgcgccggaacaggtcgcggccgttgcgcgggaactctatgccatgggctgctatgaagtgtcccttggcgacaccatcggcaccggtacggcaggcgccacgcggcggctgttcgaggtggtcgcagcccaggtgccacgggacaagctcgccgggcacttccatgacacctatggccaggccatcgcgaatatctacgccagcctgctggagggcatcacggtgttcgacagctctatcgcgggcctcggcggctgcccgtatgccaagggcgccagcggtaacgtcgccaccgaagacgtgctgtacctgctcaacggcctgggtatcgagaccggtatcgaccttgaggcattgattggcgcggggcagcagatcagcagcgtactgggccggccaacaggatcgcgtgtggccaaggcgcgtaacgccggttgagtagcttagccgtgacaatgtgttaccgcacgcctacacgtcgagtaacacgggaacatattttgtcgtatttgccgtaggccaaaccccacacaaaaatcaactcattgattttaaaggaatttaaaaagttggcacggcttctgctatctctatggcataacaagaataaaaagcgccaaacctaataaaaataagacgaaacgactctgatataacaaaaacaatacggcagagacgcagctaacagatttttttggagaagatgtgcttcgcagggtacggcatgacgaaacccgcaaccggtcagagaaaaataaaactacctcaggtagctgcccactggttggatcgattgcgaagaagcagatcagcgctcaaaaaaatacgtttgctcttgaccccggatgggggtcgccaaaaacagcggtaaagggtaacggttgccaaaaacaacaatagaccgcccctcaataataaaaaaagagcacgcaacgacaaattaaaggggaccctcgggtcccctttgtgctttcagggatttattcctgccctgcccccaactcttgcatggaaatctcgcgcatgcggaatttctggatcttgcccgtcaccgtcattggaaactcctctacgaacttgaagtgcttgggcgtcttgaagtgcgcgatgcggcccttgcaccaggtttgcagctccagctcattggcgacatggccggggtggaacttgatccaggcgacgatggcttcaccgtagcgcgcgtccggaatgccgatgacctgcacatcggctacagccgggtgggtaaagaaaaactcttccaactcgcgcgggtatacgttctcgccgccacggatgatcatgtccttgttgcgcccggcgatgcatacgtaaccctgggcatccatgctcgccaggtcgccggtgtgcatccagccggcgtcgtcgatggcctcgcgggtggcgtctgggttgttccagtagccgagcatcacgctgtagccacgggtgcacaattcgccgatttcaccgcgcgcgagggtgttgccgtcggcgtcgatgatcttgttttccagctgtggctgggtgcgcccgaccgtggtcacacggcgttccaggtcgtcgtccgctccggtttgcagcgacaccgggctggtctcggtcatgccgtaggcaatctgtacctcgcgcatgtgcagctcgctgatgacccggcgcatcacttcgatggggcacgtggcgccagccatgatgccggtgcgcaaggtggacaggtcaaagtcgcccagctgtgggtgatcgagcagggcgatgaacatggtgggtacgccataaaggccggtggcgcgttcttcggcgacggtggtgagggtcagcagcgggtcgaagccgtcgttcggatagatcatggtggtgccatgggtgatgcagcccaggttgcccatgaccatgccgaagcagtgatacagcggcaccgggatcaccaggcggtcttgcgcggtcaggcccaggctttcgccgaccatgtagccattgttgaggatgttgtggtgactgagggtagcgcctttgggaaagccagtggtgccggaggtgtactggatattcaccggctggtcgaaatgcaggctggcttgccggctgtgcaactgttcgggcgggacgccagccccgagcacggccaattgcgaccagggcatgaaccccgcgggcgggttgggatccaggctgatgaggccacgcacgtccggtttcagctcgtgcagcatggcgtggtaatcggagctcttgaatgagccagcacacaccagcaactggcaaccggactgcttgagcacgtagtccaactcactgctgcgataggctgggttgatattgaccaggatcaccccgagcttggcgctggcaatctggctgatgcaccactcggcgcaattgggcgcccagatgcccaggcggtcgcccgtctgcatgcccagggccatgaacgcccgcgcgtgcaaatccaccgtctcggccaactgccgccaggtgtagcggcgttgttgatggcgcaccaccagggcctcgccatcgggatactgcgcaactgtgtgatcgaaagcctggccaatcgtcatggccagcaaggtcttgtcctgtgagccacggctgtagctctgattcggttgatccataacgacccctgttgtcttttttgtaggttgacgtaaacgtaaactacgattgacagcgccgtaacgcaagcttacgttaacgtaaaggtgagcgccctcccctggcgccccatctacacaacaacaatgctcacattaaggtgcctgtccatgagttacccgtccctgaacttcgccctcggtgaaaccatcgacatgctgcgcgaccaggtgcagtcctttgtgggcaaggaaatcgcgccccgtgcggcgcagatcgacatcgacaacctgttccccgccgacctgtggcgcaagttcggcgacatgggcctgctaggcatcaccgtgcccgaagaatatggcggcgccggcctgggctacctggcccacgtggtggccatggaagagatcagccgcggctcggcctcggtggcgctgtcctacggcgcgcactccaacctgtgtgtaaaccagatcaaccgcaacggcagtcacacacagaaactcaagtacctgcccaagctcatcagcggcgaacacatcggcgccctggccatgagcgaaccgaacgccggttccgatgtggtctcgatgaagctacgcgccgataaacacggcgaccgttacgtactcaacggcagcaagacctggatcaccaacggccccgacgccagcacctatgtgatctacgccaagaccgacctggaaaagggcccgcacggcatcaccgcgtttatcgtggagcgcgactggaaaggcttcagccgcagcaacaagtttgacaagctgggcatgcgcggctccaacacctgcgagctgtttttcgatgacgttgaagtgccggaagaaaacatcctcggcgtgctcaacggcggcgtcaaagtgctgatgagcggcctcgactacgaacgcgtggtgctctccggcggccctaccgggatcatgcaggcgtgcatggacctgatcgtgccctacatccacgaccgcaagcagttcggccagagcatcggcgaattccagctgatccagggcaaggttgccgacatgtacacccagctcaatgccagccgcgcctacctctacgcggtggcccaggcttgcgagcgtggcgagactacgcgcaaggatgccgccggggtgatcctctacagtgccgaacgcgccacgcaaatggccctcgatgccatccagattctcggtggcaatggctacatcaacgaattccccgccgggcgcctgctgcgcgacgccaagctgtatgagatcggcgccggcaccagtgagatccggcggatgctgatcggtcgcgaactcttcaacgaaacccgctgaaggagcgctccatggccaccttgcacacccagctcaacccgcgttcggcggagtttgccgccaacagcgcggcgatgcgccagcaggtcgacgccctgcacaccctgctcgcccacgtgcagcaaggcggcggcgccaaggcacaggagcggcacacctcacgcggcaagttactgccgcgcgaacgtatcaatcgtttgctcgacccgggctcgccgttccttgaactcagccaactggccgctcatcaggtgtacggcgaagacgtgccggccgccggggtgatcgccgggatcggccgcgtggaaggcgtcgaatgcatgatcgtcgccaacgacgccacggtgaaaggcggctcctactacccgctcaccgtcaaaaaacacctgcgcgcccagaccatcgccgagcagaaccgcctgccgtgcatctacctggtggactccggcggcgccaacctgccgcgccaggatgaagtgtttcccgaccgtgagcacttcgggcggatcttcttcaaccaggccaacatgagcgcccaaggcatcccgcagatcgcggtggtgatgggctcgtgcaccgccggtggcgcctatgtgccagccatggccgacgaagcaatcatggtgcgcaaccaggccactatcttccttgccggcccaccgctggtgaaggccgccaccggtgaagtagtgactgccgaagacctcggcggtgccgatgtgcactgcaagatctccggcgtggccgaccactatgccgacagcgatgagcatgcactggcgctggcccggcgcagcgtggctaacctcaactggcgcaaacaaggccagttgctgcaacgctcgccagtcgcgccgctatacagcggtgaagagttgtacggcgtgatcccggccgacgccaagcagccgtttgatgtacgcgaagtcattgcacggctggtggacggttcggtgttcgatgaattcaaggcgctgtttggcaccaccctggtgtgcggctttgcccacctgcacggctacccgattgcgatcctggccaacaacggaattctgtttgccgaagccgcgcaaaaaggcgcgcattttatcgagctggcctgccagcgcggtattccgctgctgttcctgcagaacatcaccggcttcatggtcggccagaagtacgaagccggcggcatcgccaagcacggcgccaagctggtcaccgccgtggcctgtgccaaggtgccgaaattcacggtgatcatcggcggcagctttggtgccggcaactacggcatgtgtggccgcgcctatgacccgcgctttttgtggatgtggccgaacgcgcgtattggcgtgatgggcgccgaacaggcggcgggtgtgctggtgcaggtcaagcgcgagcaggctgaacgcgccggcacagcgttcagcgccgaagaagaggcggcgatcaagcagccgatcctcgaccagtacgaaacccagggccacccctactactcgagcgcgcgcctgtgggacgacggtgtgatcgacccgttgcagacccgtgacgtgctggccctggccttgtccgctgcgctgaatgcccccatcgagccgagccgcttcggcgtgttccgcatgtaaatggagctgtaccccatgagcgatttcaacaccctcgaactgatcaccgacccccgtggctttgccacgctgtggctcagtcgtgaagccaagaacaacgcgttcaacgccgagatgatccgcgaactgatcatcgccctcgaccgggtacaaggcgatccgtccctgcgcttcctggtcctgcgcgggcgcggcaagcacttcagcgccggcgccgacctggcttggatgcagcagtcggccgagctggactaccacaccaacctggacgatgcccgcgaactcgcggagctgatgtacaacctggccaaactgaaaatcccgaccctggcggtggtgcaaggcgcggcctacggcggtgcactgggcttgatcagttgctgcgacatggcgattggcgccgatgatgcgcagttctgcctgtcggaagtgcgcatcggcctggcgccagcggtgatcagcccgttcgtggtacaggccatcggcgaacgtgcggcgcggcgctatgccctgaccgccgaacgctttggcggccagcgagcgcgcgacattggcttgctggcggaaagctatccgatcggcgagctggaccatcaggtcgaacagtggatcgccaacctgctgcacaacagcccggcagccatgcgcgccagcaaagacctgttgcgcgaagtgggcaacggtgccctcaccccggcgctgcgtcgctactgcgaaaacgccattgcgcgcatccgggtcagcgccgagggccaggaaggcttgcgcgcgttcctgcaaaaacgtccaccgagctggcagccccaggagccgcgttcatgagtacattgacgaccctgctggtggccaaccgtggcgagatcgcctgccgcgtgatgcgcaccgccaaggccatgggcctgaccaccgtggcggtgcacagcgccatcgaccgcgatgcacgccacagccgtgaggcagatattcgcgtcgacctcggtggcagcaaagccaccgacagttacctgcaaatcgacaagctgatcgctgccgcccaggccagcggcgcccaggcgatccatccggggtatggttttttgtcggagaacgccgggtttgcccgtgcgattgaagccgccgggttgatcttcctcgggccgcccgcctccgccatcgatgccatgggcagcaaatcggccgccaagacgctgatggaaaccgcaggcgtgcccctggtgccgggctatcacggcgacgcccaggacctggacaccttccgcgccgcctgcgaacgcatcggctaccccgtgctgctcaaggccaccgccggtggcggcggcaagggcatgaaggtggtcgaggacgtcagccagttggccgagtcgctcgcttcggcccagcgagaagcgctgtcgtctttcggcaatgggcagatgctggtggagaaatacttgctcaaaccacgtcatgtggagatccaggtgtttgccgatcagcatggacactgcctgtacctcaacgaacgagattgttcgatccagcgtcgccaccagaaggtcgtcgaggaagcaccggcgccggggttgagtgttgaacaacgcaaggccatgggcgaggcggccgtgcgtgcggcccaggccatcggttatgtcggcgcgggcaccgtggagttcttgctggacgcacgcggtgagttcttcttcatggagatgaacacgcgactgcaggtggagcaccccgtcaccgaagcgattaccggcctagatctggtggcctggcagattcgtgtcgtccagggcgaggcgctgccgatcacccaggaacaggtgccgctggtcggccatgcgatcgaagtgcggctgtacgctgaggacccggccaatgacttcctgcccgccaccgggcacctggcgctgtaccgtgaatccgcacctgggccagggcgccgtgtggacagcggtgtcgagcaaggcgacgacgtctcgccgttctatgaccccatgctcggaaagctgattgcctggggcgaggaccgtgaacaggcgcggctgcggctgctgggcatgctggatgagtttgccattggcgggctcaagaccaacctgggctttctgcgacgcattatcgggcatccggcgtttgcggcagccgagttggataccgggtttattccgcgttatcaggatgagttgctgccggtcccaggagagctaagtgataagttttggcaggcggctggcgcggcctttattcagagcctgccgccgggtgagggaccgtgggcggataggcacggttttcgcgccgggctgcctgccgaggtgtcgctgcatttgagctgcgatggccaggaccgactggtgacgctggccccccaggcgccacagtggcgtggcgaacagttgctgatcgaacaacagggcgtgcgtcgcagccatctggcggtacgccatgaccacacggtgtatctgcgttgggacggcgagatgcatggggtaacactgttcgatccgattgccgcagtcgaggccaaccagtcccatcagggtgggctgacagcgccgatgaacggcagcatcgtacgggtgctggtggaggtgggccaaccggtggaagccggcgcgcaactggtggtgctggaagccatgaaaatggaacacagcatccgtgcgccccaggccggggtggtcaaggcactgttctgccaggaaggcgaaatggttgccgaaggttgcgcattggtggagctcgaaacggcgggttaaaactttgccgtggcctgtacgacgacgcccagcagccggcaatcgtcggtcagcaactgtttcgggtaggtgggattgagcggcaccaggtaacgctggccgctctcttccagcaactggcgaaaggtcgcctgggggctcccaacccactgggccaccaccaatttaccgggctcggcggcaatggccgggtccaccaggatcatcatgcccgcactgatactcaggccactgggtgcggtcatggcgtcgccggtgaccggcagccagaaggcttcgccccgggcgtggtaatccgtcagctcgaagcgggcggcgccgtaaggtgttcgcggctcacgcaattcgcacagccctttccagtcgctgaccggatagcggaaatacgggttgtagtttttctccgcaggcggctcatcgacccgctcgcgaatatccagcgcgacttccaggtagcccagccccagcgccgccagcacccgattcatgtccaccaggctcggcgcacggcgcttgttgagccaatggccgacaccgccctgggacatgcccaggcgctcagccagttcaccctgcgtgaccttgcggtcttccatgttggccctgaccaacgcgatccagttatccatgggcgcagacaatacgtcacgcagtttccagggcaataaacagtttgtagtaatccataaaacgacataaatacgatacgtactatcatcggcataaggttttcgacacccaccccagagtaccgccccttatgacgacaagcccgtatctgctgcctgaaatccccgaagacaccgagctgcacgacctgcgcagcagcggtgctgccaagcgcgcattggacttttacttgaaagaagatatgtcggcatcagccccggacgaggccctgtttgccatcaagccaggcatcagcccggaggaagccctggtgcacgcctcggacctgttgcgcagcgccgcggccacggcctatgagtcagcgagcagccatcagggcagtcatcgcgacttggcgttttcggtggtgtatttgatcgatatggcgaaggcgatggtggagcgatcgttgcaggtgccggaggctcaagcgaacggatgacaggcgcgaagaaaaaatatttctatctcacggataaaaacatttgacttgcaaatgataatgattattattgaacccagctgatcgcgagatcagtcgatagaccaagggaccttaggtcggactcttggaatatctcctcatcaggctaatcacggtttttgacccggctctttggccgggtcttttttttgccagtttccctggcatggcttcaggctaatgaagactgtgtgttgcttgatggcgcgcatggtagcaaaagactatcgccaaaagaaagccagtcgaccgctccagcccacatctttgcgaaatagcgcttgagaatcaatctcatagaccctaagctgctgcggcgtcaaggaagacgcccccctcccccttcgcaacaattttgcgtccagtctttaccagactcctgtgtaagatagccgccacaacactcatattcaggcaaccagactatgaccgtggccttgacctccatcaggatcagcaccgacttcgacagtggcaatatccaggtactggatgcccacgacgcctatcagttactgctggcaatcaaacccgacacacgcagccaacattaccaatggttccacttcaaggccgaaggcatgcacgtgggccatacccacacctttcgcctgagcaacgcgggtaaatcgtcctacccacacgcgtggagtggctacaacgccgtggcctcctatgaccacatcaattggttccgggtgccttcgcgcttcgatggggaaatcctgcatatcagtttggaaacccgcgagaagcacgcctggttcgcctatttcgaaccctacagccgcgaacgccacgactggctgatcgaacaggccttgagccgcgccgacacccaattgctggccaccggtaaaagtgccgaaggccgtgacatccaactgctgcgtcgcggcaaaggcggcgaaggtcgtcgcaagatctggatcatcgcccaacagcatcccggcgagcacatggccgaatggttcatggaaggcatcatcgaacgcctgcaacaggacggtgacgccgagctgaaaaaactgctgaaagtcgccgacctgtacctggtgcccaatatgaacccggacggcgccttccacggtcacctgcgcaccaatgccatgggccaggacctcaaccgcgcctggcagagcgccagccaggagatcagcccggaagtgttgttcgtccagcaacaaatggaaaagtacggcgtcgacctgtttctcgatatccacggcgacgaggaaatcccctacgttttcaccgccggctgcgaaggcaacccaggctacaccccgcgcatcgaggcattggaaaaacacttccgcagccacttgagcgccctgacccgcgacttccagaccacccacggctacacccgcgacctgccgggcgaagccaacatgaccctggcgtgcaacgcggtcggccagaaatacgactgcctgtcgctgaccctggaaatgcccttcaaggacaacgacgacgcgcccaacccgaagaccggctggtcaggcgagcgctccaagcagttgggcaaggacgtgttgagcacggtagccgatatcgtcaccgtgctgcgctgacgccctctcccaccggcatcactcttgggtgccggtcatgctctgcaacacaccgtcgcggcggatcagcccatggaacaatgccgccgccaggtgcaacagcaccgtcaggaacagcaggtaggcgagataaccatgggccttgcgcagcaccgcgaacaacggcgcatccgcgcccaccagcgccggcagttgtaccgaactgctgagcatcaccgggtcgcccgccgccgaaatcatcgcccagcccagcagcggcaataccagcatcaaggcatacagcaacacatgggatgccttggccgccaacacttgccacagcggcaagtcggtgggcaatgggggctgacgggtggcgaaacgcaccatcaggcgcacgatcaccagcgccagaattgcaatgcccagcggcttgtgcaggtggatcaaccactcatgccgctccgagacagacgccgccaggcccgcaccgataaacagcatggcgatgatcatcagcgccatcagccagtgcagcaaacgcgccagcggggcaaaaaaccgtggttgggcattcatggcttcgactcctgaggggcgctgtgcaacgggccgacttcaccggcgcggcgcaggtaggaactggcatacgccgccgagcgtgccgccagcaacgggtcattggacgcttggatgccactgggcagaatcagcgggtcgaagttgatgtcgcggcaatcaccgtccgcttgcggctggctgctttgcagcaccagggtgccggcattgatgactttatgctcgccagtccaggccttgctcgcctcgtccagtgggtcacccgggttggccagggtcatattcaactgccagcgcaacggcccggtagccaggcgctggaccaggtctttttccaggtaatcactccccgccggggcgacgtcgcccgccgcgtcctgactctgcggtaccacaccccagcgcacggcctggcgcttgccatcggcccctaccaggtaaaacgcgttgataccgttgtaggtttcagtcgcataactggccgaaggcttggcagtcttgacccacgccaggaacggcgcggtctcggggtgggcggcgaaaaacgccggcatgctcgccgggttcggcttgccggtggcgggctccggtgcaccggccttgagcatctggtagaacgcctcgggcgtgcccaccgggaacaccggcatgctgttcatgccggtgcgccattgctggccgttggcctgtgtgaactgcagggcaaaactgcggatcggcacactgctgtcgggcgcgtaagggttaccgctgggcaaggcaaaccggccgatcactggggtcttggcctcgctgaacacttgggcactggaataggtgcgggcttcgggcgtgctctcgaaatacccggcgacgcagatgcctttggcatggttacgccgaaagcccgggtgcacgccattgttggtttccagcgcgttgaccagggttttaggacgcaggcgctgtgggtcgagggtgccgttgacgtaggcaaaggcccccgccacaaccgcaaccacggcaccgatacccgccaggcgcgcgatcaggctcgcgatgctcaacggaggacggggcggtgatgagtgatctaccatgaaggaactccaggccaaaggccttaggggtgaacataaggtcggagcattaagacgaacgccgatcggctctattccctggccctggatttattttcaagcacggggaataaccctcaacggcgcacgtctctctcatcccagcgtagtgaccagccagattcccatgcatgaactcgacgaacagttacgcgaactcatccccaggctgcggcgctttgccgtgtccctgacccgtaacgccagcagcgccgacgacctggtgcagtcgaccctggagcgggcgatcatcagttgggccgataaacgtgtcgaaggcgacttgcgcgcctggttgttctcgatcctctaccggcaattcctcgatgctcaccgccgcacccggcgttatgcgcgcatgctggaattctttaccgggcgtgacgatgtgcagccgtcggtcgaacgcacggtgatcgcccagtcgaccctgcaagccttcgatcagctcaacaccgagcagcgcgccctgctgctgtgggtttcggtcgaaggcttgagctacaaggaagtcgccgagatcctcgatgtgcccctcggcacagtgatgtcacgcctgtcccgggcgcgccaagccctgcgtcaactcagtgatggcgaaattgccagcccttccctgcggatactcaaatgatcagcctgccccccagcgaacgcgatttgcatgcctacgtcgatcaccaactgctggagagtgatcgccgtgtccttgaaacctatctggcggcccacccggatgtcgcagcccaggtccatgcctggcagcacgacgcgcagttgctgcgtgccgcgttgggcggtgccctgcagcaaccggccaacccggacctggacccggcgctgatccgccagcgcatcaagcgtcaatcacgccgccacttcgccacggcagccgtgctgctgatcgctgtcagcctcggcggtgtcggcggctggcacgcccgtgaagtcagccagccggcccaactgcccatggccgatgcgatgcaggcgttccgcttgtttgcccaggacggcatcatgccggccgactacaagggccagggcggcggtacgatgcaggcctggctcgaccgctatttcaaccaggcccaccgcctgcctgacctgagcgcgtcgggcttcacgccggtcagcgggcgcctgctcaccaccgagcaaggcgccgccgccatggtgctgtacgaagacccgcaagggcggcgcatcagcttctacatccgcccgccaggcccggaaaacggcttcctgccgcgtggcagccgcagtgccgatggcttgcaggcccagtactggtccggtgccggctacaactatgcggtggtcagcccggcggatcagcccaccccggcgatgttgaagttctagaaacccacgtcgagtaccacgttgtcgaggtaggtgccggcgggcggtgtggtttgatcggtgtagatcctggcgttgtagttgaacacctggctgccgctacccaggccattgccggggttgacctcggcgctggaactgtcgcgccgcgccgtgcccacgctgccccagcgcgtggtgccggcgcttttgaagatgtcgtaggccaggtagttgctgcctgagatcatgcgccgccgcccgcccacactgacagcgttctggccgtcgctcaggcccacgctgtaggcactgcccttggtgcaggaaatactgatggtctggccagtgacagcggtgaacccgctgataacgggcgcactgccaaaactgatattgggcgcggtgatctggcagtcattggtgacggtcatgctcacggtcaggagcttgacttggggagtcaggttcttgtcacgcaatacgcacaagttacccacccccaggccaatgcaataatcccaggtccatgcaacgctgaggacttcggtatacaccccggccgccacattcgtcccggtaatactgcccacgtaaagcggcaggttcttgctgcccggccccgtcaaaagccccgcgcttgtcgcaatgccattggggccgaaatcgaactggagcccgcgtgtaatagggaacgtggtggtgttattgccatacagcgtataaccgatcacatcccccgtggggccgaccatgccgctggtggtcgaggtgatcgtggcatagaagtggtcactggtgccgagggcaatcagtgaagcggtgcagctcaacccgccgttgagggtcgaactgttttgcgtcgtggtgcgtacgttgatcgaactcaccgagccaaaactcaccggggccgtcgccaccgtcgaacacagcgccattgcctgccccgagcacaccatcccgaggagcgacagccagcccacgcgtctcactggcacaccaacggcccgatcagcggcacgccttgttgctgctcgtcgacctcgaatcgcgcctggcacgtacgcccttcacccagcgtgacctgcaaggtgttatgcgccgagaggttctccaggtacaccaggccgtcccagccaaccaccgcctgctggttgctttgctcgtgcaccaccaggctgcccaagggcaattcctgatgctgggtgtccaccagggtaacgctcgccgcgagtacccggcgcaatggaaactccagcaggtagccactgccacggcgcaccgacacacgttgttccacattcgggctctgcacattgagcggcaggttcagcggatcgatttcgtacttggcgcggtagtacgcgctgctccacggcaccaggagatgcccattacggtcggtttcgcccaccagctggttctcgtagcgcaccgggatacccgcgaaaccctgggtactcaccaccacaaaggcatcattgatacggttggcggcaaaggtgtcgccacccatccacaccagcgaaccgctggcatccgcccagcgtgtctcggcatcgctgctgccgtacacgccggcctggagctgcaccgactgcaagcgccaggtcaggtcggcctgccgatacgccgcgccatcaccctgggcataaccgaggttgtagcccaccccgccctcgctgggcaccgcgctgctgtaattgaggcgctggcgactggcgccgtccttgctgcgctcggtgctcaaggccaggctgccgttgaggtcgaacggaatcaccagttgcgcctgcatcgcccagttgctgtcgccgatctcgcggttggccgacaggtagaaactggtgttgcgccacagcggtttgctccagctcaggttgagcagccgcgtgcgcgaatcgtccgccgcctgcacatcgaaataccccatgcccaggctgccaaaacgctcaaggttgaggctcagcgtcacctgctcgctgcgtttgctgaggctcgcgtaagcggtgtcgaccagggtcaggtcggcgtactcgtcgtgcctttccacccgctgataggacaggctgtagcgcgtgctgttgtactgataccccaggctcagttgctggccgctgcgcccttcaaatcggctttggctgacggcggcattgagcacgccgaggttgcccagccgcaggttgccacccaggccgcccagggtcaggtcagtggaggcttcggcatggctctccagggtcaaattgtcggaataaccatagcgaaaggtaccgctcgccacgccggggccgtaggcgaagtccttcagggtgtactcccggcgcaaggtgccggcggccaccgaaaaatccgtcaggcctttttccaacagggtgctggtcacatagaacggcaccgtggtcgacacctggcgacccagggcgtcagtcgtcaccaccaccgcttcgcccgctccgttgataaacggcacgttggtcagggtgtacggccccggttgcaacagcgcgctgtcggatttgtagccattgataaacaggtccaccgacgacggcaccgcggcctcaccggcaaattgcggcagggggtaagtcaccaggtccggacgcaccgcgaagtcccgcgagaactgcacaccgccaaggcgcaccgaactgctccagggcaaggcgccgctgatcacatcaccggcttcgtaggtcagcagccgctcatcatcggagaagcgccaggtagtgtcatagcgccggtagccgttgttgaacgtaccgctgctgacgccatcggccaaggtctggcggtactggccggtgttggacaaggtgccccagttgtcgaacaaccgcacttcgttccaagcggcgaggtagctgccgccttcgtctgtgtcgttgaaatacaggtcatagttgagcaaggcgccaaagctgctcattgcctggctgcgcgggtaggtgttgcggttgccgataaattgttcctgcagccacgacggcggcacatccagcagcaggcgctggccgttgctgtcgtaatcgctgtgcaggccggggatcttgtccagcgccacgctgccgctcaattcaccgggcagcttcatgcccacgtcctgcagcgcgctggccggcacatagagttgcccggcccgttgatcgaccgcgataacgcggccggtgtccatctgattgaccaccagctccagatacaactgtgcatcggcgacagcctccatactgctcgggggcggtggcaggtcgccagccacgctcggaagcgcaaccattgcgccgcccagcccgcccaccaccgacagccatagactgcgagccagaccacgactcaccatggcgttgtgtccttcaatggacatctccatccgtttaaatcccggggcgctcctgccccgttaccggcttgttaccgctgcggcgcgaggctctccaactgcggtgcgccgttgatcctgacctgcagcggctggtcggccgacagcgctggcggcaccggccaacgcatgctggcgcccggcagcacgtagcccaacaggccatccaccaagggccggctctgcccaccctgcttgaatgacgcatcggtaaggcgcgcatgcacagcgccctggttgcgcacttcgatatagtcacgccctgctaccgtgaccttgtgccagctcagatccggcttgcccgcgcccttggggtcacgcgggcgcgtgctgtcctccttgttccacaggcccgcaccgtaggcgaacagcggcaccgaataacgcatctgaaagcggatcgccgctgcggtgttcttgccttccggcggcgtgggcacctgcagggctgaagggatttcatcgatgatgatgcggtaggccaactcttgccccggtggtacttcacgggtgcgggtcaagcgcaccaattgtttctgccctggctcgatccgcgcgacgggcgggctgccgatcacatcacgctggttctggtattgctcttcgaaaccactctggctccaggcaaacacgcgaatctgcaggctcgcggtttcggtcccacgattttccagccacagcgcgctcgcctgttgatcggcctccagcaccgggtcgatgggccagatcagcaccgagctggccgcctgcacaagccccgccgtgcacaccgcactcaaggcaatacccgcggcccacaaccgccgggatggtgaacgcataaccccactccttataccgatagccttaccacgtcagctgcacctgcagcgtgtcgctgtatgtccccccaggctgattgcccggcaattgcacccgcccgtagatcggcaggctgatgttgttcgcatcgctgtaggccacgttgacgctctggccgatccccaggctctgactgaacgccgcatccctgaacaactggtaagccacccgcgcgctaccgctattgagctgcagattgcgcccggtgctgctgtgctgcccgccgtcgacgctcatgctcagcgtcacccccggcgtgcactgcaaggtcacgccccccgtcagcgccgccgtgaccgtgctggtggccagggccgaataactgccataggtcagcgcaccataattggaactgccgcccacgatcaggcagcccgggatgatggtcgcgctcacctggaaactctggctggtcaccgccgacaacggcaacggcaccgcgagcccacaggccagcaacgctttgagccacattgctagaacgtcagttccacggccacggtgtcggtgtaggtgcctgccggcagccccgctttgcccaccgcccgaccatagaggttgacggtctgtgccaccccggtgctggtggcgagggtgatcacaccgtcaatcgccagcagcgcggaatggccgctgtcggtgtagaaatcgtagggcacgaagttgcccgcaccgtcggccaatgcacggctgccaccgggggacgcgccgtcatgtgcaccggcgcgcaccttgaccgctggcgtagtgccactggaacacaggatcgacaacgcgccaccggtgccagtaccgcccagcaactgggcatcggcgttggtgaacaggctgttggtggtgccgaaattcaagctaccgaagttcaacccggtagccgcgcccgaaccgttgacctggcaactggcgatcaatatcaggctggaggtgatctgcccggtcaccgtagttgcggcattgaggctggaggccattgccaggcccagcgcacacacacccaatcgcgaaacaagtacatgcatggttttcatcctcttgagttaccagtccagtgtcaccgtcaacgtgtcggtgtagatccctgccggtaaggcactggtatttgccaccacggagccaaacaccgggatcggtatctgggtgcccttggccacgacaaaattgcgttgttgcccgatgctataggtgctgtgcccctgcgggtcggcggacagtcgataaggaatcatctggcgcccattgctcaggcgccgagtggtgccatcaccgttggtgccgccgtcgatggtcacggtgaagctcgagaccgaggggttgcacgacaccgccaagggcgccttgtcgcccgcggtgacgccagcacccaatggattgttccaggtcggaccctgactgccgaagtcgagcatcgccgtgccgcccgtggggttgaccggcgcgctctccacgcttttgctcacttcgcaactggcggtgatcaccagccgcgcctggataaacccgctggcgacagccgcctgcacgtcatctgccagcaccagcaggccacccatggccaccagggccaggcaacggcttaccatgtcaccgtcaccttgagcaggtcggtgtagcggccgacggcggggatctccttgagcggctcgatgcgaccatagagcggcaggtcgacgaaacctgcgtccggcacccggccgctgagcggcacatccacgggcaacggcacgcgccgcgccgcgtcggcatagatgcgatagggaatgggttgggtcgatgtagtagcactgaggtagcgcacttcaccggtgccaccatgcaggccgccatcgacgcggacctggtacggcgtgtcggggttgcactccaggcgcggttggcgctggctgatcagcgccgcactcaggggcccggccgggtcatccagacgcgggccgctgccgaaatccagtacgcccaattgctcgataccagcgctgcgggtggtgcccaccaactggcaaccgcgctgcacgtcgatacgcacctccacctggagctgtgcaccgtaaaccgtgttgcagagcatcgcgcccatgattgccaatactgctcgtcccttcactgccccaaatccttgtacaggggtgactgctgtgtaggaggttagtcactcagcgagaaactgccagtctggacaggattaccttcacgagatgctttttcgagatagctggcagcgtccttctctattggtcaaaacgcgacgagcgccctaaagtgagcgaccaccgaaatacagagtgacttgcattggccgcgctttccctgatccgtcgcctgctcggccaaaagcccgggccccttgacgcttcgcccattcccgcgttttttcagcaaaaggccgcgcaacagggttacaccctgagcaccggtcaaacccgcgccattgctgccctggcccgggaaacccaacaactgctcgctggccagcccgcccgcagcctgtacctccacggccccgtgggtcgcggcaaaagctggctgctggacgggttcttccaggcgttaccgatcgccgagaagcagcgcgtgcacttccatgattttttcgcccaactgcatcgcggcatgttcacgcaccatgcgcaggacgatgccctggccgcgacgctcgatgagcagttggcaggctgccgggtgctgtgtttcgacgaattccacgtccatgatatcggcgatgccatgctgatcacgcggctgttcaaggccctgttcgagcgcggtgtactggtgttggtgacgtccaactatgcgccgcaagggttgctgcccagccccctgtaccacgagcgcttcaagccggtgatcgacctgatcgccgcgcgcatggaggtgctggaagtcagttcgccccaggactttcgcagcctgccccaggcccaaagcacacaacgttttacctgcggtcaatacgtgtggccgggcaccccggggcagcgggcggcactcgacctgcccgccgcagacgcccctccccgccccctgggcgtcggccatcggaccttgatgtgccgccaccatcaagggcgcagcattgccttcaccttcaacgacctgtgcgaacaactgacggcggtgatggactacctgctgctgtgccaggactacgaccactggatcatcgacggcctgcctcaactggcgaactgcccgattgccgtgcagcagcgctttatcaacctggtggatgtgctttacgaccgcgacaagcacctggtactgatcggcgaattaccgctcgaggttgccttgagcggccaggccatcgacctggcccgcaccgccagccgtcttggacaattgcagcaggcctccccgcaacacacccccgacccggtatcatgagcgcctttcacgccttcttgccgagtgaccgcgccgttcatgaataccctcgcccaactcaaggccggccaattggccggcatcacgcgcctggacctgtcctgcgggctgaccgaattcccccgggaaatcttcgagctggccgactccctggaaatcctcaacctcagcggcaatgccctgcgcagcctgcccgaggacctgcaccgcctgccgcacctgcgtgtgctgttctgttcggacaacctgttcaccgaactgccggcgtgcctcggccaatgcgccaaactgagcatgatcggcttcaaggccaaccagatcagccacgtgcccgccgccgcgttgccgccgctgctgcgctggctgatcctgaccgataaccgcatcagcgcactgcccgaggcattgggtgaacggcccttgctgcaaaaactgatgctggccggcaaccacctggcgcacctgccgcaaagcctggccgactgccacaacctcgaactgctgcgcatcgcttccaatcgcttcacgcgcctgccgcagtggctattgacgctaccgagcctgacctggctggcttacgccggtaacccggtggaaatggcggtgaccgtggcgggtgaagacgccacgccggacattccctggtccgaactggaactggccgaagtactgggcgaaggcgcgtccggcgtgatccgcaaagcacagtggacaccctccaatacgcccgtcgccgtcaagctctataagggcagcatcaccagtgacggctcaccgctgcacgaaatgcaggcgtgtatcgccgccgggttgcaccccaacctgatcaaggtcgaaggccgcgtgatcggccatcccgatgaccaggccgccctggtgatggacctgatcgagccgagttaccgcaacctcgcggccctgccgagcctggcgtcgtgcacgcgggatatctacgcaccggacacccatttcagccttgaagtggcgttgcgcatggcccgtggtatcgcctcggtagcggcgcacctgcaccgccacggcatcacccatggcgacctgtatggccacaatattctgtggaatgaagcaggtgactgcctgctcggggattttggcgccgcatcgttccatgccacggcggacaccgaggaaaccagggcgttgcagcgtattgaagtgcgtgcgttcgggattttgctgggggaattgctggagcgggttgaggaacaggtgagcggtgaatggctgacgctacaagcaaggtgctgtcagcccgatgtgctggcacggcctggattcgaagagatcgaagccatcctggcctctatccaactgcgctgacccgatatgtgagggggcaagccccctcccacatgttgaaggttcagccagccaggccgacgaacatatcctgcacgtcatcatggttgtccaggccttcgaggaaggcttcgacttccgccatctgctcatcgctcaaaccgctcaccgggttcttcgagaggtagccgagcttggccgacagcacggtgaaaccctgctccggcaaggctttctgcacggcgtcgaggtcggtggtctcggtgatgaacagggtggtgccctcttcttcgccgtcttcgaaatcctgggcgccggcttcaatggcggccatttccggatcggcgtccgggctgtccggcgaggcttcgatcaggccgacgtggttgaagtcccaggccacggaaccggaagcgcccagctggcccttgcggaacgccacgcggatttccgccacggtgcggttgatgttgtcggttacgcattcgacgatcagcggcacctggtgcggggcgaacccttcgtaggtcacgcgatggtattgcacggtttcgccgagcagaccggcgcctttcttgatggcgcggtccagggtttccttgggcatcgaggcctttttggcctgttccaccaccagacgcaggtgcgcgttggtcgcggtgtcggcgccattgcgggcggcgatggtgatttctttcaccagcttgccgaagatcttgcccttggcattggctgccgcttctttatgtttgactttccactgtgcgcccatgactcactctctttatgtccatcgcgccgaaacgtctactggccggcgctttgggggcagagtttatagcgcaaaaacgcatcgttccaccaaaaaaccgtcagggcgccaactcgaaaaacacctggatcaggcgcaatgcgcggcgccgttccatgcagccgagcaagtgacggttcaccaggccatcaccctggatcggcacggcgcacacccgcgggtcggggctgacctccatcgacgacaccaccccaacgcccaattcggcagccacggcttccgtcaccgcctcgcgactgtccaactccagcagcaccctgggctgtacaccggcagcgagacaagcaccgtcaaacgtgcgccgggtgatggagccgggttcacgcaacaccatgatcacctcatgcagttgctccaactgaacaccctcggcctgcctggcccacggatgcgccaccggcaccagcgcgcagatccgcgattcggccaaaggctgcaggtgcaggccattgcgcggctcgacctcggtcagcaccgccacgtccgcatgctcggacaacagcgccgccagggtttcctgggcgttgcccaggcgcaggttcacggtgatgcccgggtagcgcgcacgcaggctggcaatcatcggcatcaccaagtgcggaccgtccgccgccacttccaggcgcccggtgagcaattggcgattggcttccagcaggctctgcgcctcgtccaccagaccgaagatcgcccgagtaatggccgccaggcgcgtgccttcctcggtcagttccacgcgcctggcagtgcgacgcaacagcgcgatctggtagtgctcctccagggccttgatatgcccggtcaccgccggctggctgatgaacagccgcgccgccgcacgggtaaaactgccctcgcgggccacggcatcgaatgcacgcagttggaacaggttcatagctatcggcctcactgatagctcgcataacaacaaacaatttgattgatgacaagccaaactgcaatttagacgccgtagattcaaccgatgcttcgcgaggatttgtaatgacgacgcccatcctgctgacccccggccccttgaccacatcgaaccgcacccgccaggccatgctggtggattggggttcatgggacgagcgcttcaaccagctcaccgccagcgtctgcgaacagttgctggcaatcatcgacggcgccgccagccaccattgcgtgcctttgcaaggcagcggcaccttcgccgtcgaagcggccatcggcaccctggtcccgcgcaacggcaaggtactggtgctgatcaacggcgcctacggcaagcgcctggcgaaaatctgcgaagtactgggccgcgatttcagcaccttcgaaaccgccgaggaccaacccaccaccgccgccgatgtgggccgcctgctgcacgccgacaaggccattacccatgtcgcgctgatccactgcgaaaccagcaccggtatcctcaaccccttggccgagatcgcccaggtggtgaaacaccacggcaagcgcctgatcgtcgatgccatgagttccttcggcgcgttgcccatcgatgcccgcacggtgccattcgacgccctgatcgccgcctccggcaagtgcctggaaggcgtgccgggcatgggctttgtcttcgtcgaccaacaggcgctggccgccgcccaaggcaactgccactccctggcgatggacctgttcgaccagcacagctacatggccaagaccggccaatggcgcttcaccccaccgacccacgtggtggcggccctgcatgaagcgctgctgcaatacgccgaagaaggcggcctgcgcgcacgtcatcaacgctacgccaataactgccaggcactgctggacggcatggccgaacggggcctgcgcagcttcctgccggcggacatccaggcgccgatcatcatcaccttccacgccccgcaggacccgcgctaccacttcaaggacttctatgaacgggtcaaggccaagggtttcattctgtatccgggcaaactgacccaggtggaaaccttccgcgtgggctgcatcggccatgtcgatgccagcgacatgcacgccgccgtcagcgccatcgctgacgtactgcaggccatgggtattaccctttcatcgattggagcacacgcatgaactatcaaaaccccaacaccctgcaagccgtgatcctcgattgggccggcaccgtggtcgacttcggctccttcgcacccacgcagatttttgtcgaagccttcgccgaattcgacgtgcaagtctccatcgaagaagcccgtggcccgatgggcatgggcaagtgggaccacatccgcaccctgtgcgaccagccgcaagtcgccgagcgctaccgcaacgccttcggccgcacgcccaccgacgatgacgtgacggccatctaccagcgcttcatgccgttgcagatcgagaaaatcgccgaacactcggcgctgattcccggcgccctcgacaccctcgcccgtttgcgggtgcaaggcatcaagatcggttcgtgctccggctaccccaagcaagtgatggacaaggtggtcgcactggccgccaccaacggctatatcgccgaccacgtagttgccaccgacgaagtgcccaacggtcgcccatggccagcccaggccctggccaacgtgattgcgctgggcatcgacgatgtggcggcgtgcgtgaaggtcgacgacaccgtgccgggcatcctcgaaggccgccgcgccgggatgtggaccgtcgccctgacttgctccggtaatgccctgggcctgacctacgaacagttccgtgcactggacgctgccacactggccagcgagcgcaagcgcatcgaggcgatgttcgcaggctcacggccacactacctgatcgacaccatcaacgacctgcctgcggtcatcaccgacatcaatgcgcgcctggcccgtgggcaaatgccgcagagctactgatagaggtcaacatcacggcacttaccccaggcaaaccgctcaaaaccggcatacagtagaaggactccatcgccaaagaatggagatttgccctgatgagtgaggaacccagcgatgccgtggaaaaactccgatacacgctacagcaccatgtcgattgcgttgcactggttgatggtggtgctgctggcggtggtctacgcctgcattgagttacgcggccagtttcccaaaggcagcggtgcgcgaacgttgatcgtcgagatgcacttcatgttcggccttaccgtgtttgtgctggtgtggttgcgcctgttcgcacgcagcctgggagtggcgccgaagatcgtaccggcgccgccgccatggcagagcctgttggcgacgctgatgcacgttgcgctgtacgcgttgatgatcggcatgccgattgcgggttggctgattgtcagcgccgaggggcattcggtgatgttctatggcatggaattgccgccgctgatcgcggaaaacaaggcgctggccaagcagattgaaggctggcatgtgctgttcggcaagatcggctactggttgatcgggctgcatgcgctggccgggatcgcccaccattacatcctgcgggacaacacggcgttgcggatgatgccgggcaagcgcgctaacccttgaagcctcgctggccttgcagcccgccggtgtggacgaagaccaggcgagtgccgggggcgaagcgcccggcttcgatccgggtcttcaaggccagtaacgccttgccggtgtaaagcggctccaagggtacgccgcaggcctgctgggtggtgtcgatgaagtcgagcaactcggggtcgactttggcgaagccacctcgactggcgtccagcagttcatagcctccctgcacgatggcctcgacgttctgcgccacaccgtgatcgtccggcaccgccatggcgccgtacaccgggtgcgcgcccgcctctgccagtgccaggccggccagggtggtgccggtgcctgccgccagccaccaggcgtcgtaatccgtccagcccacgctgtgcaactgtgcacgcacctgctcgaccagcaccgcgcaacccagggcgcccgcacgaccgccgccgccttcgggcacggggtgcaggttgggatactgctcacgccacggcaaccagaaacccgactcatgccgcgcgcgataaccgccatagcccagccaatgcagctgcatgccgaaggctttcaggtcgaggacggtgggggtgtcttgcggatgcccgcgcagcaggccgacggtagggaaaccgaagcgcttgccagccgcggccagggcatgcagatggttggaataagccccgcccaggctgatgaggccgcgagcggcttgcgcctgcgccaggtgcccggtgagcttgaaccacttgttgccgctgatcagcgggtcgatgcggtccaggcgcaacacggccagctcgacacctctgagccaatccaggtgcagcggttcaagcggtgcgtggggaagccaatcgaagggacccatcgggcgggatctgcatgaaaaacggggcggtagtctaccaccgccccgcccagggtcttacagctcggcggcgaggcgcgagccctggttgatggcgcgcttggcgtccagctcggccgccacatcggcgccgccgatcaggtgcacattctggccggcggcgagcaggccgtcgtgcagttcgcgcagcgggtcctggccggcgcaaatcacgatgttgtccaccgccagcacctggggttcgccttcggcgccaatgcgaatatgcaggcctgcatcgtcgatcttcaggtactcgacactgttgagcatctgcacctgcttgttcttcaagccggtgcggtggatccagccggtggtcttgcccaggccgtcgccgaccttggaggccttgcgttgcagcaggaacacgtcacgcgccggtgcatggggttgcggcttgatcccggccacgccgccacgggcttgcagccgggtgtcgatgccccattccttccagaatgcttcgcggtccaggctggtggaaacgccctggtgcacgaggaattccgacacgtcgaaaccaataccacccgcgccgatcaccgccacacgcttgccgaccggtttgcgctccaggatcacatccaggtagctcagcaccttggcgttgtcgatgcccggaatcgctggggtacgcggtgcgataccggtggccaggatgatctcgtcgtagccacccgccgccagttgcgccacatccacgcgggtgttgaggcacagctccacatgggtggtctgcaatttgcgtttgaagtagcgcagggtttcgaagaactcttccttgcccggcacccgcttggcgatgttgaactggccgccgatctcgctggcggagtcgaacaacgtcacctggtggccacgctcggcggccaccgttgcggcggccaggccggcaggaccggcacccaccacggcaatcttcttgatctgcttgaccggcaggtagttgagctcggtttcgtagcacgcccgtgggttgaccaggcaagtggtcagcttgccgccaaaggtgtggtccaggcaggcctggttgcagccgatgcaggtgttgatttcatcggcgcggccggcggcggccttgttgacgaactccgggtcggccaggaacgggcgcgccatggagaccatgtcggcatcgccctcggcaagaatctgctcggcgatttccggggtgttgatgcggttggtggtgatcagcggaatctgcactgcaccgcgcaacttggcggtgactttgctgaacgcgccacgcggcaccttggtggcaatagtcgggatgcgcgcttcatgccagccgataccggtgttgatgatcgtcgcaccggcgccttcgatggccttggccaactgcacgatctcttcccaggtgctgccaccttccaccaggtcgagcatcgagaggcggaagatgatgatgaaattcgggcccacggcctcacgcacgcggcgcacgatttccacggccaggcgcatgcgattttcgtagctgccaccccagcggtcggtgcgatggttggtatgggcggcgaggaactggttaatgaagtagccttcggaacccatgatttccacgccgtcgtactcggcgacctgggccagcagcgagcaggtgacgaaatcctggatctgcttttcgatgccctcttcgtccagttccttgggcttgaacgggttgatcggcgcctggatcgcactcggcgcgacctgtttggggctgtaggcatatcggccggcgtggaggatctgcatgcagatcttgccacccgccgcgtgcaccgcctgggtcacgatcttgtgtttctgcgcttctgcgtcggtggtcagcttggccgcgccggcatacacaccgccctcgtcattcgggccgatgccgccggtgaccatcaggcccacaccgccccgggcgcgctcggcaaaataggcagccatgcgttcgaaaccgccgggtttctcttccaggccggtgtgcatcgagcccatcagggtacggttgcgcaaggtggtaaaacccaggtccaacggggccagcagatgcgggtaggcagcagcggtcatggtcaagctccacaacggatcatcacggggtgtgacgggctcgtgcggcccgccatcggtttatgtcccacagactaaaaggcggtggatgacggctcaatgactgaaactgacaagttattgatccaaatgcacagcgccccttggcaagcccgcccatgggccctaccctagtcggcgaaccctgcacacggtctgttgtctgttcccccatgcgtaaacttcttgcttttaccgtctccctggcgctggttgccgccatcgccgcgtatctggtctggacccaggagcgccccgtggcgcattacctgtcggaccttcggatcaccctggccgtcaacgaaggcctgcctgctgaccgcggcaacctgctgggcatccagccggagctgtttcccgccgactaccagagcctggaacgcctgcacctgaagctcgcggcctacctgcaaaaagcccgggaccaggggctgatcaacgacaagaccatcgtggtgctgcccgaacatatcggcacctggctgatgctcaccggcgaaaagaacgaggtgtaccaggcgctccatgtgaaggatgcgatgaactggctgtcggtcagcaacccgctgctgttcgcccgcgcctggatcagcgccaccggcgacaaccgcaccgacgacgcctacctgcgcatgaaagcctcgggcatggcgcgggactaccagctgttgttcggcggtctggccaaggaattcggcgttacgttggtggccggctccatcaccctgccgaacccgagcgtgagccagggtcaactgcaggtcggccatggcgccttgtataacgccagcgtggtgtttgccgccgacggcttgccgatcggcgatccgcagcgccagctctacccgatctacgatgagcgcggcttcatcaagcctggcgatgaaaacatcgtcagcgtggtcgacaccccggccgggcgcctgggtgtactggtcggcagcgacagctggtacccggacaactaccgcaagctcaacgaacaaggcgcgcaattgatcgcggtgccagcctttgtgctggggcgcgacacctgggaccgcccttggcgcggcttcaaaagcgtgtccaccccgaccgaaatcagcctcaagcccgaagaactcagtgagggcgaagcctggcgccgtcttacgctgatcagccaacagccgatcagccaggccagcgccggcatgagcgtgttcctgcgcgggcagttctgggacctgggcaccgccgggcacagctttctcagcagcaacgggcaaatcagcgccgatggcgaggcccgtggcgcgcgcttgttgaatatctggttgtgaaaccggtacggctgggggacctgtcggtgggcttcgtgcacagcctggccgatgccatccacagccacggcctggacccgcagccgctgctgctgcaatacggactcgacccggcgcgcctcgccgaagccggtgcacgcttgtcgatcccgcgctacatgcgcctgggccacgccgccatccagctcaccggcgacccaggcctgggcctgcgcatgggccagctcagccgcttgagccaggcgggactggccggtgtcaccgcggcccaggcgcccactgtgcgggaggcggcgcgcgcattaacgcgcttcgaggcgctatatggctccaactatcgcgggcagtcgagcttcgtcgaggatgccgagggcgcctggctgcgcttctactccatcagcccctacaacgcctacaaccgctttgtggtggactcgatcatcgccggctggctgcatcagttgtcgagcctggcccagcaaccggtgcaggcgcagcgcatcgacatcgagttcgaggcgccggagtacagcgaacgctacgacgcgctgggagacgttcacttcggcgccgacgccaatcaactgcgcctcgaccagcacaccctggccctgcgcaacccgcagcactgccccagtacctggaacctgttgttgcagctgtgtgagcgagagttggagcaactgacccgcacccgcagcctgcgcgagcgcattacccgtttgctcgggccgatgctcaatggcggccgggaacccgacctcgaagaagtggcggcacgcttgaagctgccgacctggacgctgcgccgcaaactggccgatgaaggcactcagtttcgcgcgattctcaacgatacccgccgcgacctggccatgacctacattcgcgatacggaactggcgttcggcgagatcgcctacttgctcggttttgcctcggcccaggcgtttcaacgggccttcaggcggtggaacaaccagaccccaggggaatttcgccgcagtcagcggcattccgcctgaagtcggtcttacagctctgtagcgtcgtctgccggttccagcgggtccaactcaatcgcgtggtactcgagcagttcttcctggtaatcgtccatgccggactccttcttgagttaacaggggttgcagataaatgacctgcatcaccagcctaaagtgccgtgatgacgaaaaaatgtcgacgtcatgacgttcctgcactcaagaatcaaacgtagcagccttgtgcggatttagcctctgcgaattactgcgcaggcgtcggcaggggcggaatcgcttctgtcggcgccggcaggtccgggttgctggtggccggcgcgggttccgcctgcggcgcaagcggcgcagcctcggcaggcggcgtgacgggctgggacaccgctggctcttccttcggcggctcggttttctctgccgccggtgcggttttaggttccggcacacccagctcggctttcggctgctcggggatatgcgcggccttcttcacttcctgaggcaggaacacgtccaccagcgcaaagtagcgctcgtagaatttcggcgccgaaacggtctcgctcgccacctttaccatggaatcatcggtggaaccgatcggcatcgataccgaccccagcacgcccacacccaggctcgcggagttgttgaccttcttcagcgcgtaacggtcctgcaaggcgttggcgaacatggtcgagtgattggtgcctttgccatcgtcggcacacaccacgttgaagctgatctgcaggtgggtctcgccggtctgctggaagctcttgttgcccaccaccagtttcggatcgctgctggtgatgatgtagccctggctcagcaaggcacgtcgcgccgcttcgcacgccgccacatcggtgaccgggtaatcgcgggaaaacgtaccggagtcgtcgaaattctcatgttcataaatggcggtcttgggtgacgagcagcccgcggcgcccgccagcaccagcgccagcccgaggctacgcaagtgaaatgatgtcgacattgaaaatcctgaggaaaacggtccgggcggtattgtgcaacagaacgaggccttggcgcgcgcattcctgtcggtaaaacgtcacagccctaccgcgtaccggccgtaggaaaaagccctgcacacatatgatcaataaacacgcgcaatttgaccgaagcatggcgacttgatggccataacatccagaaactgccccggtgttccaggcagtcatccagcaccctttgcagccgcccgtcctggacggcctgattgaccatgtagtctggcaggcaagcgatccccaacccttcgagtaccacatgcttgagcgactcgatcgtggtgctgaccaacggggtgcgcaggactggctccgaggcgccgggcgccaggcgtaacggccagggctccagcttgccggtggcgcagaacttgtggcgcaggcaggcatgcccgttcaagtcctgcggctgttgtggcgtaccgtgctggcggaaataggccggcgtgcccaccagcaccaactggtagtgtcccagatggcgcgccatcaagcgcgaatcttctggcttgccggtacgaatcaccgcatcgaacccttcttcgatcacgtccaccatgcggtcggaaaaatccacatccagctcgatttccgggtaggcgcgcatgaagtcgctgagcaccggcatcagcaagccgcgcacctgcggcacgctgatgcgcaacgtgccacggggcatggcgctggcgtccgtcagctcccgctcggccgcctcgacctcggccaggatccgccgcgaacgctccaggaacagcacgccttcactggtcaacgtgatgctgcgggtgctgcggtgaaacagccgtacgcccagacgttcttccagccgcgcaatgctcttgccgacggccgacgacgacacgcccagcacacgcccggctatggtgaagctacgcgtttctgccacctgtacgaatacagagaggctacccagactgtccatgagcgagtccctggaaattgcggactccaacgtccgataagttcggaaccttagcctgtttttccgtagaccacagccccctactctgtcgacttgcccatttgcatggatagagcgcgatgacctccctcaccgattccgccgtgactgcccgaaaagaaacactgccgctgggaggattactggccctggccagcgccggctttatcactatcctcaccgaagccatgcccgccgggctcctgccgcagatgggcgacggcctcggcgtatcgcccgcgctggtcggccaattggttacgctgtacgccctgggttcgctgctggcggccattccgctgacgctgttgacccgaggctggcgacgccgccccttgctgctggtcgcaatcggcggctttgccctggtcaacagcgtgaccgcgctctccagccactatgggctgaccctggtggcgcgtttctttgccggtgtattcgccggactgctgtgggcgctgttggcaggctatgccagccgaatggtcgcgccccacctgcaaggccgggccatcgcagtcgcgatgctgggcgcaccgctggccctgtcgctgggtgttccagccggcacctttctgggggctgcggttggctggcgcctgagttttgcaatcatgaccggcctgacgctggtgctactgatctgggcacgcctgcaactgccggatttcgccggtgaaccggcggggaaacgcttggggctgcttcaagtgttcagcttgccgggtattcgtccggtgctgtgggtgacttttacctacgtgctcgcccacaacattctctacacctacatcgcgccgctgctggtgccggcgcggattgccgccgatattgaccaggtcctgctggtgttcggccttgcagcgttgctgagcatttggctggcgggtgtattgattgatcggtggttacgcccgttgctgctgatcagttgtgcgctgttcggtctggtcgccttggcgctggcgttctggatgaacctgccggcggctatctacctcgcggtcgcgctgtggggcctggcgttcggcggcctgcctgcgttgctgcaaaccgcactggccaaatcggcaggcgaatcggcggacgccgcacaatcgatgctggtgaccgtgtggaacctgggcatcgcaggcggcggactggtgggcggtgtgttgctccaaggctggggcgtcggcgcattcacctgggcggttgtgctgctgatgctactggccctggccggcgcgttacaggcggcgccccaacaactggcccggccacccttcaaggtcgaacgttgaaatacgctgatacccgcacgcctcgtaaaaacgcaccaggtcgcccgtgccgccggcgtaacagtccacgcgcaggcgcttgaccccggcagcgcgggcacgctcatcggcgaaagccaacagctgccgacccaacccacgcgcacgtgcatcacgtgcggcgatcagcaaacgcacatagacttccggctcagacgctggcggtacgtaaggcatgggctcgcccagcacaagtgccgccagcaaccgcccctcaggcgtttcaaccacccaggcaccgggcatggcacacgcgtctgtgacttgcgctacccgccggggcaatgcggaccagggcgtggtgccccattgggcgttattacccatcccgacaaaccaggcaatcacctcgtcaaacacctgcagcacggccggggcatccgctgcgctggcatgacggatcacccagccttcttttccttgaatagacacgcgcgaaactccttggtcggcgataacgaatgaccagtctagcgcacataaaaaagcccccggtcttttcaggccgggggctttttattcaaaccgacatcagaacttcttgatgtcagccttggtttccaactgcttgcggtaggccgcgaagtcctgctggccgacacgggaggcgaggaagcggcggtattgcgccttttcttcgtccgttggcgcagcggcctcgttgacgccgttcaggcgcacgatgaccaggctaccatccgccagggttacagtggtaaaggtcggcttgtccttggccgcaggcttgggcatgcggaacacggcttgcagcacggcagggtcgatcgcttcctggctacgggtagccgcttcattgaccttccaggcctggccgtcgaccggctggttcagcggggtcttgccatcacgcaagctggcgatcagctcgtcagcgtgagtcttggcagccgcgctggcgcgctccttggccatctgcgtgcgaatcgccgctgcgacgctttccagcggcagttgcgaaggcttcaggtgctctttggcacgcagcacgatgatggtttccgggtccagctcgatggcgctgctgttggcaccctcatccagcacttccggactgaacgcagcggtgaccacggcgcggttggccgcaacaccttcgccaccttcacggccaaacggcgcggaggtgtgtacggtcagtttcaggtcggacgccggctgggccaggtcggaggcttcaaatgccgcatcttccaattgcttggtcgcttcgacataacgctgctcgacctgctgggtcttgagctctttggtcagcttgtctttcaggctggcaaacgtcggcacttgcggtgcctcaacgcccaacagtttgatcaggtgccaaccgaagctgctacgcaccggcgccgatacctggtccttgttcaacgcgtacaaggcggtttcgaagtccggatcgtagacgccagggccggcaaagcccaggtcaccgccattgctggccgaacctggatcctgggagaactccttggccagggcttcgaacttctcacccttggccaggcgtgcctggatttcttcgatcttggccttggcttgcgcatcggtcgtcttgtcgttgacttcaatcagaatgtgcgcggcacgacgctgttcagcgaggttggcgatttctttctgataggcggcctgcagctcatcatccttcaccgtaacctggtcgaagaaggaagacttcttcagctccagatagtcgatgaccacttgatcaggggtcatgaactctttggcgtgctggtcgtagtaagccttgacctcatcgtcggtgagcttcaccgccgcagggttggccttgatgttgacggtggcgaaatcgcgggtctgcttttccaggcgggcgaatgccaggacttcggcgtcggtcacgaagccgctgccagcgatgcctgcgcgaacctggccgatcagcatttcctgggtcagcatctgacggaactgcatacgggtgtagcccagctgacggatcacttggtcaaagcgttcagggctgaacttgccatcgacctggaattccggcgtctgcaggatcacctggtccagcgcagcttcagagaagccaaacttggcgtcggcagcgccttgcagcagcagcttgcgatcgatcagacccttgagggccgcgtcgcgcagcagtttttcgtccagcagcgaagcatcgaaatccttgcccagctgttgcatcagctggcggcgttgcatgtcgacggcctggctcagttcggtctgggtgatttcttcaccgttgaccttggccacgtcctgcttgttgttacccgaagcctggaaaatggcctcgataccggtgaacgccatcaacgcgacgatgatcccgataatggtcttggcaatccagccttgtgaattgtccctgatattttgcagcatgcgtcccccagaaacggttgaacttcaagaataggcaaccgtggagcgtgggtagagtacggatataagaaaggcgcatccaaggatgcgccttctcgcaactggcggagcggacgggggttttcgttctccccccggcttggcgacccgatgcatacctgggtctgctggccgctccgctgccaggtcgaacctgcgttcgacccgggtaggtaaaggcttgatcgaagcttagttaacggcttctttcagggctttaccggctttgaaacctggtttcttggcagcagcgatttgcagtgctttgccagtctgtgggttacggccagtgcgagctgggcggtcagtcacagagaaagtaccgaagcctaccagtactacggagtcgccggccttcagagcgccagtgacggattcgattactgcatccagcgcacggccagcagcagctttcgggatatcagcggatgcagcgatagcatcaatcagttccgacttgttcactctaagtccccttatatatctattgagtatgattctaagttttttggtgaaagcaaaaaccagtgctgaatggcctacagacacttaagagccgctttataacaagggctctaaaaagctgtcaaggaagcccccaggctttaacacattaatgcgtgctaattctttccttggaatcagactcacgtttttcgtccttagcaactatctccggagccacatccggcaagggctccggcgcgtattgcagcgcaatttgcaggacctcgtcaatccatttaaccggtttaatctgaagatcctgcttgatattgtccggaatttccttcaagtcgcgaacattctcttcaggaatgatcacggtcttgataccaccccggtgtgcagcaagcaatttctctttcagaccaccgatagccaacacctgaccacgcagtgtgatttcgccggtcatggcgacatcggcgcgtaccggaatgccggtcaatgccgagaccagggccgtgcacatgcctacgccggcgctagggccgtctttgggggtcgccccttccggcatatggatgtgcgtgtcgtgcttctcgtggaagtccagggggatccccaggcttctggcgcggctgcgcaccacggtctgcgcggcagtgatcgactcgaccatcacgtcaccgagggaaccggtcttgatcaattggcctttgcccgggatcacggcggcttcgatggtcagcaactcgccgcccacctgggtccacgccaggccagtcacctggccgacctgatcctgctgctcggccaggccgtagcggaatttgcgcacgcccaggaagtgttccagcgaatcggccgtgaccttcaccgagaagcgtttttccagtgcatgttccttcaccgccttgcggcagatcttcgcaatctggcgctccaggcctcgtacaccggcctcgcgggtgtaatagcgcacgatgtcacggatcgcctcgacctcgaactcgatctcgcctttcttcaggccattggccgacgtctgcttgggcgcgaggtacttgacggcaatgttgatcttctcgtcttcggtgtaacccggcagacgaatcacctccattcggtccagcaacgcgggcgggatgttcatggagttggaggtgcacaggaacatcacatcggagaggtcgtagtcgacttccaggtaatggtcgttgaaattgtggttctgctcggggtcgagcacttcgagcaaggcagacgccggatcgccacgcatgtcgctgcccattttgtcgatttcatcgagcaggaacagcgggttgcgcacacccacctttgtcatcttttgaatcaatcttcctggcatcgaaccgatgtaagtgcggcgatgaccacggatttccgcttcatcacgcacaccgccgagggccatgcgcacgaatttacggttggtggcgttggcaatcgactcggcgagtgaggttttacccacacccggtggaccgaccaggcacaacaccggcccgcgaatctttttcacgcgtttttgcacggcgaggtattcgaggatacgttccttgacttcttccaggccatagtggtcggcatcgagaatgtcctcggcacgcgccaggtccaggcggaccttggtctgcgccttccacggcacctgcaccagccagtcgatgtaggagcgcaccacggtggcttcggccgacatcggcgacatctgcttgagcttgttcagctccgcagtggccttggtcagggcatctttcggcaggccggcggcatcgatgcgctttttcagctcttcaatttcgttgtggccttcctcgctgtcgccgagctccttctgaatggccttcatctgctcattcaagtagtactcgcgctgactgcgctccatttgtttcttcacgcgaccacgaatgcgcttctcgacctgcaacaggtcgatctcggcatccagcagtgccagtacatgctcgacacgggccggcaggtcgatgatttcgaggatgtcctgcttctgctcgatcttcagcgccatgtgcgcggccatggtgtccaccaggcggcttggctcatcgatgctgttgagggaggacaggacttcagccgggactttcttgcccaactgcacgtactgctcgaactgcgagagcaggctgcgtacaaacacttcggactcgcgctcaggggcctcgacttcgtcgatcagcgccacttcggcgcgcaggtggccgtccacctccatgaaccgctcgaccgcgccgcgctgctcaccttccaccagcaccttgacggtgccatcaggcagtttgagcagttgcagcacggtcgcaatggtaccgacgcgatacagggcatcttcgcctggatcatcatcggcaggatttctctgggccaacagcaggatctgcttgtcgcccgtcatcgcggcctcgagggcttcgatagacttctcgcgccccacgaacagcgggataaccatgtgcggatagacgacgacatcacgcaacggcaggagaggcaattcgatggttgtcttcatgatttcgcctctatgacagttcaaaaattagcttgaaaccaagatgggggctgcatgcaaaaaaaacaagcttattgccagcagttaaacgcagtaaacgctccggcgtaaaaaacgccgtaaaaacaaaggggcccctggaggccccttgtttataccgacactgcgaaacgcttacgcgtcgggcgcagctttggcagccttggcagccggctcactgttttcatagatgtacagtggcttggacttgccttcgatcacgctttcgtcgatcaccactttactcacctcggactgcgaggggatttcgtacatggtgtcgagcaacacgccttcaagaatcgaacgcaggccacgtgctccagtcttgcgctccagtgcccgcttggccactgacttgagtgcatcggtacggaactcgaggtctacaccttccatctcgaacaacttggcgtattgcttggtcagggcgttcttcggctcggtgaggatctgaatcaaagccgcctcatccaattcgtccaacgtggccaggaccggcagacggccaacgaattccgggatcagaccgaacttgaccagatcgtcaggctcgacttcacgcagggactcgcccaccttcttgccttcttccttgctgcgcacttctgcactgaaaccaatgccaccacgggtggaacgctgctggatcactttttccaggccggagaacgcgccgccacagatgaacaggatgttgcgtgtatcaacctgaaggaattcctgctgcgggtgcttgcggccgccttgtggcggtacggaagcgaccgtgccttcaatcagtttcaacagtgcctgctgcacgccttcaccggaaacgtcccgggtgatcgacgggttgtccgacttgcgcgagatcttgtcgatttcgtcgatgtagacaatacccatctgggccttctctacatcgtagtcgcacttctgcagcagtttctgaatgatgttctcgacatcttcacccacgtagccagcctcggtgagggtggtggcgtcggcgatggtgaacggaacgttcagcaggcgagcgagggtttctgcaagcagggttttacccgagcctgtaggaccgatcagcaagatgttgctcttgccgagttcaacttcgtcgcctttcttgtcacgctggttcaagcgcttgtagtggttgtataccgctacggccagaaccttctttgcacgctcttgaccaatcacatactggtcaaggatgccgctgatttctttaggcgaaggcaatttatgcgcgctgctctcggcctgggcttcctgcacctcctcacggatgatgtcattgcacaggtcgacgcattcgtcgcagataaacaccgaggggccggcaatcaatttgcgtacttcatgctggcttttgccacagaaggagcaatagagcagcttgccgttgtcctcgccgttgcgggtgtcagtcattcgttcgatccaaatccgataggcttgcaacacaagatgaaggcttatgcgggctttttcaagcccgccagtggtcggacatgccgaccagccctattttgagcggcttatattaagcgggacgctgggtgatcacttcgtcgatcaggccgtatgccttcgccgcatcggcactcatgaagttgtcgcggttggtgtcgcgctcgatttcttccagggtgcgcccgctgtgcttggccatcaacgtgttgagacgctcgcggataaacaggatctccttggcgtgaatctcgatatccgacgcctggccctggaaaccgcccagtggctggtgaatcatcacgcgcgagttaggcaggcagaaacgcttgccctcggcaccggcagtcaacaggaacgcgcccatgctgcaggcctggccgatgcaggtggtcgacacgttcggcttgatgaactgcatggtgtcgtagatcgacatgcccgctgttaccgaaccgcctggggagttgatgtagagatggatgtccttgtccgggttttccgcttcaaggaacagcagctgcgcacagatcaggttggccatgtagtcctctacggggcccaccagaaagatcactcgctccttgagcaggcgcgagtagatgtcgtaggcgcgttcgccacgagcggactgctcgacaaccatcgggaccaggccgccagcggcctggatatcagagttctgctgaatataggaattacggaacatgctctgcagttactcccaaatagtcatgtcttgaaaacgcataagccagcgcgaggctggcttatggttgaatttccaacgagttggacaatcagtcggcttgtgctgcttccgccggtttgactgcttcttcgtaagagaccgctttatcggtcaccttagccttctgcagaacagtatccacaacttgttcttccagcacaaccgaacgcacttcgttcagttgctgatcgttcttgtagtaccaagccacgacctgctcaggctcctggtaggccgaagccatttcctggatcatttcgcgaacgcgatcttcgtctggcttgaggtcgaactgcttgaccacttcagccacgatcaggcccagcacgacgcggcgcttggcttgctcttcgaacagctcggccggcagttggtcaggcttgatgttgccaccaaactgctgaacagcttgaacgcgcaggcgatccacttcgttggacagcagggccttaggcacttcgatcgggttggcggccagcagaccgtccatgacctggttcttgaccttggatttgatggcctggcgcagctcacgctccatgttcttgcgaacttcggtgcggaaaccttcgataccggtttccttgataccgaattgcgcgaagaattcttcgttcagctctggcagcttaggctcggaaacggtgttgacggtcacggtgaactcggcggctttgccagccaggtccaggttctggtagtcagcagggaaagtcaggttcagaacgcgctcttcgccggctttggcgccaaccaggccgtcttcgaaacccgggatcatgcggttggaacccagcaccagctgagtacccttggcggagccgccagcgaagacttcgccgtcaaccttgccaacgaaatcgatgttcagctggtcttcgttctgggcagcacggtcggccacttcgaaacgggtgttctgcttgcgcaggatttccagcatgttgtccaggtccgagtcagccacttcggcgctcaggcgctcgatggcgataccgtcgaaaccggccacttcaaactcagggaacacttcgaatacggcaacgtattccaggtctttgcctgcttccagggacttaggctcgatcgacggcgaacccgccgggttcagcttttgctcagtgaccgcttcgtagaaagaagcctggatcacgtcacccacagcttcctggcgcgcatcggcaccaaagcggcgcttgatttcgctcattggcactttgcctggacggaaaccagcgatcttggccttctgggcagtctgctgcagacgcttgttgaccgcagtctcgatacgctcagccggcacggtgatgctcaggcgacgctcgatagcagtagtattttcaacagaaacttgcatggatattcctcgttgcacagacgttagccggccatttccgaccccaatcaagggcatgcattctagtgggtcaaactcaagaagtcaccctactgcaaatacacccgaaaacagccagcaatttatcggtacgaaggcactgatgcaccccgccccggtgacaaatacagcccatcacgccagggctctgcgccgccccttctatatatagaagaagtcgtcatccatctccctgacggccaacccttcaaacgggactggcaggcagcgcagcatcatcgagatacataaatacgacgaaacgccctgccgttgcgacccagtgactgcgaccgcggaatattcgaaccgctaaaaccaaaaaaggcgccagactgttaaatctggcgcctttcgaatatggggtggacgaaggggatcgaaccctcgacaacgggagtcacaatcccgtgctctaccaactgagctacgcccaccatattgcgttaacaaagaaaccaaaccacttctttgtctagccttaccctgcttctcaacaaggcgaagctttatttggtgcggatgaagagactcgaactcttacgcctcgcggcgctggaacctaaatccagtgtgtctaccaattccaccacatccgcgcttgaagctcttaaagcaaaggcgccagacgattaatctggcgccttttaaaatatggggtggacgaaggggatcgaaccctcgacaacgggagtcacaatcccgtgctctaccaactgagctacgcccaccatctgacgctacttgtgccaaagctgcctaatggcgcacccggcaggactcgaacctgcgaccatccgcttagaaggcggatgctctatccagctgagctacgggcgccttattaatctgtactcttggaggattacaaactaagtgcttccagccttgcagaacaacacgctattctgctcgaccttcttaaccagtgctaggctgtgcccgacaagtgcgacgaatagtatagacgccctccaaacccgtcaaatcttttttgaaaaaaattcattttatttaaggggttagggcaatttgcagaccaagcgcctttgccctcacgccttggcatgcgagaatgcgcgcacttttcttccccctctcgatggttaatcacgcgtaatgactgcacaacttatcgacggcaaatcaatcgccgccagcctgcgccagcagatcgccaaacgagtcaccgagcgcagccagcaaggcctgcgcacgcctggcctcgcggtgatcctggtcggcagcgatcctgcctctcaggtttatgtctcgcacaagcgcaaagactgtgaagaggtcggctttatttccaaggcctacgacttgccttccgagaccacccagcaggcccttaccgacctgatcgacggtctcaacgacgacccgaagatcgatggcatcctgctccaactgcctctgcccgagcacctggacgcctccaagttgctggagcgcattcgcccggacaaagatgtcgacggcttccacccttataacgtcggccgcctggcccagcgtatcccgctgctgcgcccatgcacgccgaaaggcatcatgaccctgctggaaagcaccggtgtcgacctgtacggcctcgacgccgtggttgtcggcgcatccaacatcgtcggtcgcccgatggccatggaactgctgctggccggctgcaccgtgaccgttacccaccgcttcaccaaggatctcgccggtcacgtcggccgcgccgacctggtcgtggttgccgccggcaagccgggcctggtcaagggtgagtggatcaaggaaggcgccatcgtcatcgacgtgggcatcaaccgccaggaagacggcaagctggtcggcgacgtggtgtacgacaccgccctgccccgtgccggctggatcaccccggtacccggcggtgtcggcccgatgacgcgcgcctgcctgctggaaaacacgctgtacgccgcagagaccctgcacacctaataaccgggcgtactgaaaaagccctgccttatcgcagggctttttattgcccgcaataaaccctatttttcttagtttttaagaactttcgtccggttctagaagaacattcgacagtttctgatccatactcctaaaatgtaacggcatttatccaaaacccgtttccgaacggtatttccttactttttagcgagttcatccgcgtgaaaattcgtctctctattgtcagcctattttttgcgtttacaggcaccttcgctcacgccgccgaaaccacccaggccccgcgtgacacctcgaaactgcaaatcgcctccggcagcgccatgctggtagatctgctgaccaacaaagtcatctactccagcaacccggatgtggtggtgcccatcgcctcggtgagcaagttgatgaccggcctggtggtgcttgaagccaagcagaacatggatgagtacatcgacatcaacatcaaggacacgccggaaatgaaaggcgtgttttcccgcgtgaaaatcggcagcgagatgccgcgtaaagaaatgctgctgatcgcgctgatgtcctcggaaaaccgtgccgccgccagcctggcgcaccactatccgggcggctacccggcgtttatcgccgcgatgaacgccaaggccaaggcgctgggcatgaccagcactcactatgtggaacccaccggcctgtcgatccacaacgtgtccaccgcccgggacctgagcaaattgctcgccgccgcgcgtcactatccgttgctcagccagttgagcaccaccaaggaaaagaccgtgtcgttccgcaagcccaactacaccctgggcttctccaacaccgaccacctgatcaaccgcgccaactgggacatcaagctgaccaagaccggcttcaccaaccaggccggccactgcctggtgctggtgaccagcatgggcaaccgcccggtgtcgctggtgatcctggatgctttcggcaaattcacccactttgccgatgccagccgtatccgcaattgggttgaaaccggcaagagcgggtcggtgccggatgtggcgttgcgctacaaggccgacaagaacctgaaaaatcggccgaatgctgcagaagcgcgtcgataaccaaccattaaaaaacggcgcttgatagcgccgttttttatttgcgctccgccaacaccttcagcgcctgggccgccgcccgctccttcccggcctgggccgtcgcgttagccgcatcccgccagcgctgcgcgtcgacattggctggcaactggctcgggcgctgggtgaggattgcccagtttccggcacttttccattttgactcgaagtcgccgaagctcatcaacaggcgccggtccatgcctgagcgcagcaacaccgtgcttttctgctgattgaaccccaccactaccacgtagtgcgcgtcagaccacagcccgccgccaatccgcgccatcaccggataacccgccgccacctgcgccagcaccgccgtcaactttgcatcgagcgggtacaccatcagcccgtactcacgcgccagcacctgcatgttgcgttcaaggtccgcttcgccacccggcaaatgcaacggcttatccagcaaccccggtgtcatgacaatgccttgttgcgacagcatgctggctaacgatgtaggaccgttctgataagcctcgctacgaaaggtcggcacgccattgagttcgacacgctccggcaggcccgccagcctcgacggtgtggaggaacaggccgctaggcccagggcacaagcaagcaacaaggatgtttgaaggttcgaccgtaaccgcaattttctactctcttgatcgactgccggtaatggccctgatcatagcccaatcgcgtttgtgtagggcgcgtggatatagcaaagaagttggttggactcgaccattggtcaatagcaggcaaccgcccggtagctagactgtccattgagaagactgtgtgtgcccgtaggggcgaaaggaggcccgaatgagccttgcaacgacgattttactgctgatctgcggttggctggcggtagccggcgccatgttgtggggggtgttgcgtattacccgccggcaccatcacccccacgccaaacccgttgcacccgccaagcctcacaaggccgcggtgcatcacgcctagcctggcatgcaattgaagtcctgcgtcgccgcgacttccttgccgtgcccgtccatcaaggaggcgcgcacggtggtgcccaggctggattccaccagggtgtagtgctcacccgctctgaaatgcttgtactcgacacgtccctcgcagtcctgctggttgtcgtcgccgggttcttcctcgaacagcgtcacatccaggcgatgatcccccggcggcacttcaaaaaagcgtccgtcatccacgcgcttgccatctacccgctcggccatcaggtcattcggcgcttcttctttcagaccaatccacgcttcgctcgggtcagccttggggatcgggccggcgcatgccgacaacaacagcgcagcaccgagggcaggaatcaacaatagaggtttgagtgacatggcagggctccaaaacaggacaaggcgtccaatgggttgcaagcttgaggagcagccctttgtagaacaaatgaatacatatgaaacgatcttcagcccttacctaaatgttccttcacctggctgaaaggtgcgtgttaggtgggtcgcgtgagactgccggggtttgcaatcctgctcctttcggaggtttcacgcatgctcgggctggtaaagaccgcactgcaaaagccatacacctttatcgtgttggccatcttcatctgcatcatcgggccgatggcggccctgcgtacccccactgatgttttcccggatatcggcatccccgtggtcgccgtggtctggcagtacaacggcctgtcgccggacgccatggccggtcgggtgatctacacctacgaacgctccctgagcaccaccgtcaacgacatcgaacatatcgaatcgcaatccttgcccggcatgggcatcgtcaagatcttcttccagcccggcgtggatatccgcaccgccaatgcccaagtgacggcggtttcacaaaccgtgctcaagcaaatgccacccggtatcacgccgccgctgatcctcaactacagcgcctctacggtgccgattctgcaaatggcgttttccagccccagcctctcggaagccaggatccgcgacctggtgcagaacaacatccgcctgcccctcagcgccctgcccggcctggccatgccgacgccgatgggtggcaagcaacgccagatcaccctcgacctcgacccgcaagcgctggctgccaaaggcctgtcggcgcaggacgtgggtaacgccctggcactgcaaaaccagatcatcccggtgggcaccgccaaactcggccccaacgaatacacgatcctgctcaacaacagccccaaggccatcgacgaactcaacgacctgccgatcaagaccgtcgacggtgcgctgatcacgattggccaggtggcgcacgtgcgtgacggctcgccaccgcagaccaacatcgtgcgcgtcgacggccaccgcgccgtgctgatgccggcgctgaaaaacggcagcatttccaccctgtcgatcatcgatggcatccgccagatgctgccgcgcatcaacgaaaccctgccgccgtcactgaagacctcgctgctcggcgacgcttcggtgttcgtcaagcaatcggtgggcagcgtggcccaggagggcatcattgccgcactgctcaccagtgcgatgatcctgctgttcctcggcagctggcgttcgacgctgatcatcgccgcgtcgattcctctcgccgtgctctcggccatcgcgctgctggcggccagcgggcaaaccctcaacgtgatgacgttgggcgggctggcattggccgtgggcatcctggtggacgacgccacggtgaccatcgaaaacatcaactggcacctggaacaaggcaaggcggtgaagaccgcgatcctcgacggcgccgcgcagatcgtcggcccggcgttcgtctcgctgctgtgtatctgcatcgtgttcgtaccgatgtttttgctgcaaggcatcgccggttatctgttccggccgatggccctggcggtgatctttgccatggccagttcgttcatcctctcgcggacgctggtgccgaccctggcgatgttcctgctcaagccgcacacgccggagccaggcgccgggcatcacccggaagatgagttcatcaaccaccacgagggcgagcagcacccgaaaccgcgcaatcgcgtgctgcaatcggtgctgaatttccagcagggcttcgagcgtcacttctcgaatatccgcgacacctaccacagcctgctgaccttggccctaggcaaccgcaagcgttttgtcgtcggcttcctggcctgtgtactggcgtcgttcctgctgctgccaagcctgggccaggatttcttcccggccaccgacgccggcgccctggccctgcatgtgcgcttgccactgggcacgcgcatcgaagaaagcgccgcggccttcgaccgcatcgaggcgcggatccgcgaaatcatccccgccgaagagctggacaccatcgtcgacaacatcggcattccgctcagcggcatcgacatggcctacagcagcagcggcaccatcggtccgcaggatggcgatatccaggtcaccctgaaaaaagaccatgcccccaccgccgactatgtgaaaaaactgcgtgaagccttgccggaaagctttcccggcagccacttcgccttcctgccggcggacatcagcagccagatcctcaacttcggcgcccccgccccgctggacgtgaaaatctccgggcgcaacgacgaagagaaccgcgcctatgcggtagaactggagcgccgcctgcagcatgtacccggcatcgccgacctgcgtatccagcagtccaccggttacccgtcgctgcaggtgaatgtcgaccgcctgcgcgccaatggcctgggcatcaccgagcgtgacgtgaccaacagcatggtcgcctccctcgccggcagttcccaggtggcgccgacgttctggctcaacccggccaacggcgtgtcctactccatcgtcgcggctaccccgcaataccgcctcgacagcctgccctcgctggaagccctgccggtgaccggtgccgacggccagtcgcagatcctcggcggcgtagccaccatctcccgcgtgcaaagcccggcggtggtcacccactacaacatcgagccgaccctggacctgtacgccaacgtacaaggccgcgacctcggcggcgtggcccgcgacgtgcagaaagtgctggatgacaccgcctccatgcgtcccaagggcgcggtgatcagcctgcatgggcagatcgatgcgttgcatgaggcgttcagcggcctgagctttggcctgctcggtgcggtggtgctgatctacctgctgatcgtggtcaacttccagtcgtgggtcgacccgttcgtgatcatcaccgccttgccggcggcgctggcggggatcgtgtggatgctgttcctcagcggcacgtccttgtcggtgccggcactgaccggcgccatcctgtgcatgggcgtcgccacggccaactcgatcctggtggtgagcttctgccgcgaacgcctggccgaacatggcgatgcgctcaaggcagcgctggaagccggctacacgcgcttccgtccggtgtgcatgaccgccctggcgatgatcatcggcatgttgcccctggcaatttccgaagagcagaacgcccctcttggccgtgcggtgatcggggggttgattctcgccaccaccgccaccctgttgtttgttcccgtggtcttcagcctggtccacggtcgtcatcctacccgcgcagttgctggagaaagcccacatgtcgtctgatcacaaaccctcgcgcaagcgtctgatgctcatgggtgtcggcggcctgaccctggccgccctgttggtcgccaacggcctgcacgcccgcaccttgcacgaacagtcggtcaccgcctggaccgagaccgccgccatcccgcaggtgatggtgttccaaccgcagcagaacgcggccggcgataccctgcgcctgcccgcacacttggaagcctggagcaaggcgccgatccatgcccgggtcagcggctacctcaaggactggaaagccgacatcggcacccaggtcaaggctggccaggtcctcgccgagatcgacagcccggacctcgaccagcaactggcacagacccacgcacgcctggtgcaggaacaggccaacgcacgcctggccgccaccaccgccacgcgctggcagaacctgctggccagccactcggtgtcgcgccaggaggccgatgaaaaaacttccaatgccgccgccgccaaagccaacgccgaggccgccgcggccgactacgccaggctgaccgcactggaaagctacaagacgattcgcgcgccgttcgccggcaccatcaccgcacgtaacaccgatatcggccagttgatcaaggccgacaccgacagcgacccggaactgttcaacatcgccgacacccaccaattgcgcctgtatgtgccggtgccgcagaactacgcggcggtcatccaccccggcctggaagccgaattgactgtgcccgagcatcccggcgagcacttcaaggcgcgcctgatcggcgactccaccgccatcgaccgccgttccggcaccctgctcgcgcagttcgtggccgacaaccccaacggcgagttgctgcccggtgactatgccgaagcgaccctgccgatcccggcggacacccatggcgtgagcatcccggccagcgcgttgatcttccgcgcccagggcacccaagtggcggtgctggacgcgcagaatcacgtgcacttgcaggacatccatatcggcctcgacctcggtgaacgcctggtcatcgaccaaggcctgaaacccgccgaccgtgtggtcgacaacccgcccgacgccctgcgcgaaggcgacccggtgcaactggccgacgccgctggaggttcgcatgcgcccaaggcttaagcccctcgttgcactgatgctgctggctctacagggttgctcgatggcgcccacctacaaggtgccgccgattgacctgcctgcgaactatcgcgagcagaccagtgacggcccctggcacagcgcgcaaccgtccgatcaactggcacccgaatggtggcagctctaccacgattcacgcctgaatgacctgcaacagcaactgctcaaggccaaccccgacctagcggcggcactggcacacttcgacgcgtcccaggcgtatgccagccagctacatgccggcctgttcccgcagatcaccgccagcgcgcagccgttgcgccagcgccaatcggattcacggccgctgcgggggaccacgcagccgtcggtgtacaacagcaatacagcgggtttctcgctgagttacgacctggacctatggggcaaaatccgcaaccaggtggcggccggcgatgcccaggcgcaagcatcgggggatgacctggcggtggcgcgcctgagcttgcagcatcaactggcgagcctgtatgtgcagctcaatgggctggatgcacaggcgcggatcctcaacagttcgctggatgatttcagccaggcgctgcaactgacccgcagccggtacgagggccagattgcttcagagctggacctgacgcgagcacagaaccaactcgccgaagccaaggcgcagctggatgaagtccgcgggcaacgcaacctgaccgagcatgccatcggtgaactggtgggcgtggcggccagcgatttctccctgccgccgagcccgcaattgattgcactgccgggcatcccatcgcagctgccaagccatctcctgcaacgtcgaccggacattgcagcggcggaacggcgggtgtttgcggccaatgcgaacataggtgtagcaaaggccgcgtggtacccggatttcagcctgaccgggttgattggcgggcagacgcaaggcgtcggcaacctgctgtccgccggcaatcgctattgggcgctggggccgctggtgaatctgccgatctttgacgggggccgcttgagcgccaacgagcgccaggccaaagccgaattcgaagaggcatcggcgcactaccgcagtcaggtgctgaaggccgtgcgcgaggtggaagataacctggcgcaactgcgggatttgcagcaggaagcgcaggatgaacaggcggcggcggatgcggcagagcatacacaagccttggcgatgaacagctatcaggccggggccgtgagttatctggatgtggtgaccgcgcagacggcggcgctgcaggcgcaaaggacgttgcaggcggtgcagacgcggcagttgcaggcgagtgtggggttggtgacggcgctgggtggtggctggcagccgggtgcttgataaggtgggtcagtcacataactgtcaactgaactaccgcaatcgggggcaagccccctcccacacttgtcctgtgccagacacacaatgtatgaacgccgcagaactaatgtgggagggggcttgtccccttccaccctgctcctgtgccagacacacaatgtatgaacgccgcagaactaatgtgggagggggcttgcccccgatggcgttcttccagacacatcctgccaaaagccagcccgtcagccttttacgcaccgatctagcctctctgaacacaccttgagagggccagggaatggcagatttacccgcttcacatcggctgcgcatcggacgcttcagcgaacccaaccgcatctacctgatcaccaccaacacccacgaacgcctaccgatattcagcgacttccacctcggtcgactggtggtctggcagtttcgcctggctcagtaccgagggctcgcaaactccctggcgtgggtgatcatgcctgaccactttcattggcttattgagttgaaaaaaggctcgttggcggacctgatgcggcaggtaaaatccaagagcacgcggtccgtcaacggcctaagcggacgcaagggaagactctggcaggaaagcttccatgaccgggcactgcgcaaggaagatgatctagtgaagatggcgaggtatgtagtggccaatccattgagagcaggcctggtgaaaaagatcggcgactacccattgtgggatgccatctggatctaacatcacacactgttcaaatgtgggagggggcttgcccccgataacagggtgactgacccaccgctatcgggggcaagccccctcccacatttttttctaccgtatttcaggcggctaacttgccgctggcgattgcggcggaagctgccaccattgcgcgtaatagaaccgcacacccagcagccaggtcatccggcgcggcattctcgatttcgttgtggctgatgccgccctcgcacggtacgaaaatcatccccgccgggccaagttcggcgacgaaaattgcgtcgtgccctgccccactgacgatgtccatgttcgacaagcccaggccattcgccgcattgcgcaccgcgtctacgcagccctgatcgaaatacagcggcgggaagtcagcggtgggctccatctcgaaactgagcccatgcttggtgcaggtgtcctcaatgaccttgcgcacctcactgatcatcgagtccaggcgggccggctccaggtgacgaaaatccagggtcatgcgcacttcaccgggaatgacgttgcgcgatcccggataagcctgcaggcaacccaccgtgccacatgcatgaggttggtgccccaatgcagctgcgttcaccgccgccaccaccgctgccgcgcccaccagagcatccttgcgcaggtgcatcggcgtcggccccgcatgcgcttcaaccccccgcagtttcaggtcgaaccacttctgccccaaggcgccgagcaccacaccaatcgtcttcttctcatcctcaagaatcggcccttgttcgatatgcgcctcgaaatacgctcccaccttatgcccgctcacaggccgcgagcccgcatagccaatcgcattcagcgcatcgcccacgctgacgccatccacatcgaccttggccaaggtatcggccagggtgaatttctcggcaaacacccccgagcccatcatgcatggcggaaaacgcgagccttcttcattggtccacaccaccacctccaacggtgcctcggtctccagcttgagatcattgagcgtacgcagcacttccactcccgccagcacaccaaaacagccatcgaacttgccgccggtgggctgggtgtcgatatggctgccggtcatcaccggcggcaggttggggttgcgtccggggcggcgggcgaagatattgccgatgccgtcgacggtcacggtgcagccggcgtcttcgcaccactgcacgaacagatcgcgggccttgcggtcgaggtcggtgagggccaggcgacacacaccccccttgggcgtggcgccgagcctggccaggtccatcagcgattgccacaggcggtcgcggttgatgtgctgatcggtggattgcagaacgtccagggcagcgttcatggggatctcctcaggctacatttcttcttatggattgacggtgaccggcgtggccccgcgcttggcattcaggccgtaatacaacaacccacccagcgccgaaccggtaaaccagccatagctgtagaaccagctgaacgcatcgctgcccaacgacagcaaggtcagcaccaccggcacgccgaacgcgatgaaaccgctccagttccatgccgggtacaggtcatcgcgatacaggccggccaggtcgagttgctgtttgcgcgtgatgaaatagtccaccaccatgatcccggcgatcggccccaacaggctggaatagccgagcaaccagttggagtagacggtctccaggctcacatcggaaacaatcaggccgagttttttcagcagctcatgggccatcaacgccagcccgaccaggccggtgaggatcaccgccgtggtgcggttgatcagcttgggcgcgatgttctggaagtcgttggtgggcgagacaatgttcgccgcggtgttggtggacaaggtggcgacgatgatcagcgccatggccacggccacccacaccgggctctggatatgcccgatcagggtcaccgggtcggacacgctgacgcccaccagtttcaccgaagcggcggtcatgatcacgccgagggcggcgaacaggaacatggtcagcggcaggccgaaaatctgcccgaggatctggtccttctggcttttggcgtagcggctgaagtcaggaatgttcagtgacaaggtagcccagaaccccaccatcgcggtgagcccggccatgaagtaaccggtgaggctcgcaccctcgggacgcttgggcgggatcgccatcaattcgctgatcgacacgttgggcatcgcccacaccagcaggccgatccccaccgccaccagcaacggtgccgacagggtttccaggcgcttgatcgactcggcgccacgcagcaccacccacaggttcaggcaccagaaaatcatgaagccgatcacctcgcccgtgccgccaagggacttccacccctcgaagatcgagcccaggaacaggtggatcgccaacccgccaaacatcgtctggataccgaaccatccgcacgccaccagtgcccgaatcagacacggcacgttcgaaccaaggatgccgaatgacgagcgcagcaacaccggaaacggtatgccgtacttggtgcccggaaaggcgttgagtgtcagcgggatcagcaccacgatgttcgcgagcaggatcgccatcagcgcctcgcccaccgacaacccgaaatacgcggtgagcaccccgcccagcgtgtacgtgggcacgcagatcgacatgccgacccacagcgcggtgatgtgccacttattccaggtgcgttcgtgcaccttggtcggtgccatgtcgtggttgtagcgagggctgtcgaggacgtcggggccggcgtcgagttcgtacaggccgttgcgctcaatgacttgcgatctgttctgttgcatggccgctccacggttttttcgaattattgttgcgcgcctgcagttgagtgcaggcggccggagtacctcgtaaacaacatgacatcacgggcccggccagccgcctctgcactcaataaccgtgccgacaagcgttaccgcaccctcaccgcttatataacgtgctgatgtttatcagctttccgattgcgccttgggtacttgccgcgttactcaggctaaatagtgcggaagttgtccgaaccatcaggactcaatctggtgcaacacaattatttttatttcccctgcccgtcaagaggcatgtctcaagcgtctgatttgcaataagaaatgttgctcaatttaagaacctgtcaagtgcgtcaaaatggtgagaggtcgctacattttggtgattattgatttttatccttataaatcaatagattgaaaactatataggcttataaaaaatcttcttgcccaatcgaaaaactcgggctagtttctattcctgtcaccgatgacaggaattaaccgaccatcggcaagcagcactacaacacttagaactggcacaagccggtcaagcctgtgaggaactcgacatgtcgctgttgatccgtggcgccaccgttattacccatgatgaaagttaccgcgccgatgtgttgtgcgcagacggtctaatccgggctattggtacgaacctggatattcccgccggcactgaactactcgatggcagcggccaatacttgatgcccggcggcatcgacccccatacccatatgcaactgcccttcatgggcaccgtggccagtgaagactttttcagtggtacggcggcgggcctggcggggggcaccacgtcgatcatcgatttcgtgattcccaacccgcagcaatccttgctggaggcgtttcaccagtggcgcggctgggcggaaaagtcggcctctgactatggcttccacgtggcgatcacctggtggagcgagcaggttcgcgaggaaatggccgagctggtcagccaccacggcatcaacagcttcaagcatttcatggcctacaagaacgcgatcatggcggcggatgacaccctggtcgccagcttcgagcgctgccttgaactgggcgcggtgcccaccgtgcacgcagaaaacggcgagctggtgtatcacctgcaacgcaagctgatggcccagggcatcaccgggccggaagcgcacccgctgtcgcgtccgtcgcaagtggaaggcgaagcggccagccgcgcgatccgcatcgccgagaccctcggcacgccgttgtacctggtgcacgtctccaccaaagaagcgctggacgagatcacctacgcccgtgccaaaggccaaccggtctacggtgaagtcctcgccggtcacctgttgctggacgacagcgtctaccaacaccccgactggcagaccgccgccggctacgtgatgagcccgccgttccgcccacgcgggcaccaggatgcactgtggcacggcctgcaatcgggcaacctgcacaccaccgccaccgaccactgctgcttctgcgccgagcaaaaagccgccgggcgtgacgacttcagcaagatccccaacggcaccgccggtatcgaagaccgcatggcgctgttgtgggacgaaggcgtcaacaccgggcgtctgtcgatgcaggagttcgtggcgctgacctccaccaacaccgcgaagatcttcaacctctacccgcgcaaaggtgcgatccgtgtcggcgcggatgccgacctggtgttgtgggacccacagggcacgcggaccatttcggccaagacccatcaccagcaggtcgacttcaacatcttcgaaggcaagaccgtacgcggcgtgcccagccacaccatcagccagggcaagctggtctgggccgatggcgacctgcgcgccgagcgcggggccggacggtatgtggagcggccggcgtatccgccggtgttcgagcagttgagcaagcgggctgagcattccaggccagtagctgtgaagcgctgagaccgctatcgggggcaagccccctcccacattgaccccattccaacaggatcaacgcggtcaagtgtgggagggcgcttgctcccgatgaggccagtgcaagcaacaaaaaaaccactgcccatcagaggcagcacctcaataaccgtgaggccaacaccgtgatccagaccctgacccacctcccccatcccgttgaagatggagcgaccctcgccagccacttcaccgacctggccacccccctcaacgcccgccaggcccaactggaagcctcgcgctgcctgtattgctacgacgcgccgtgcgtgaacgcgtgccccagcgaaatcgatatcccctcgttcatccgcaacatccacaccgaaaacgtgcaaggcgcggcgcagaagattctctcggccaacatcctcggcggcagctgcgcgcgagtgtgccccaccgaaatcctgtgccagcaagcctgcgtgcgtaacagtgccaaagaatgcgccccagtgctgatcggcctgttgcaacgctacgccatcgacaacgcacacttcagcgaacaccccttccagcgcgccgcgcccaccggcaaacgcatcgccgtggtcggtgccgggcctgccggactggcctgcgcccatcgcagtgcgttgcacggccatgatgtggtgatcttcgaagcccgggaaaaagctggtggcctcaatgagtacgggatcgccaaatacaaattggtggacgactttgcgcagaaggagctggatttcctcttgcagatcggcggcatcgagatccgccacggccagcgcctgggggacaacctcacgttgagcgaactacaccagcaattcgatgcagtgttcctcggcctcggccttgccgcgagcaaacaactcggtttggcgaatgaagacgcccccggcctgctcgccgccaccgactacatccgcgaactgcgccaggccgacgacctcacccaactgcccctggccgaccgctgcatcgtgctcggcgcgggcaataccgccatcgacatggccgtgcaaatggcccgcctcggcgcccgcgatgtgaacctggtgtaccgccggggcctggcggacatgggcgccacccaccacgaacaggctatcgccaaggccaatcaggtgcgcctgctgacctgggcccagcccgaagccgtgctgctggatgacctgggtcatgtacgcggcatgcgcttcctgcgcacgcacatggaaaacggccgcctgcaccctaccggtgaaaccttcgaactggccgcagacgcgatcttcaaggccatcggccagggtttcgacaacgaggcgctgcacgacccgctggccgagcaactgcaccgcgtcggcgaacgcattttcgtcgacgagcagctgcgtaccagtgttcccggggtgtacgccggtggcgattgcgtcagcctcggccaggacctcaccgtgcaggcggtgcaacacggcaagctggccgctgaagccatgcacgcccaactcatgctgactgtggaggctgcgtaatgaccgatctctcgattgtgttcgccggtatcaaggcccccaacccattctggctggcctccgcgccgcccaccgacaaggcctacaacgtggtccgtgcctttgaagccggctggggtggcgtggtgtggaaaaccctcggcgaggacccggcggcggtcaacgtgtcgtcccgctactcggcgcactacggcgccaaccgggaagtactgggcatcaacaatatcgagttgatcaccgaccgctccctggagatcaacctgcgggaaatcacccaggtgaaaaaggactggcccgaccgtgcgctgatcgtgtcgctgatggtgccgtgcgtcgaggaatcctggaaaaacatcctgccgctggttgaagccaccggctgcgacggtatcgagctgaacttcggctgcccccacggcatgcccgaacgcggcatgggcgcggcggtgggccaggtaccggagtacgtggagcaagtgacgcgctggtgcaagacgtactgctcgctgccggtgatcgtcaagctcacgccgaacatcaccgacatccgcgtggcagcgcgagcggcgtaccgtggcggtgcggatgcggtgtcgctgatcaacaccatcaactccatcaccagcgtggacctggagcgcatggttgccctgccgatagtcggcacccagagcacccacggcggctactgcggttcggcggtgaagccgattgcgctgaacatggtcgccgagatcgcccgcgacccacagacccagggcctgccgatctgcggcattggcggcatcggcaactggcgcgatgcggcggagttcgtcgccctgggctgcggcgcggtgcaggtgtgcacggcggcgatgctgcatgggtttcggattgtggaagagatgaaggacggactgtcgcgctggatggacagccaaggctacaaaagcttgcaggaattttccggacgggcggtgggtaatacgacggattggaagtacctggatatcaactaccaggtgatcgccaagatcgatcaggcagcctgcattggctgcgggcgttgccacattgcctgtgaggatacgtcgcaccaggccattgccagtctgaaacaggcggatggtacgcataaatatgaggtgattgatgacgagtgcgtgggctgcaacctgtgtcagatcacgtgcccggtggccgaatgcatcgagatggtgccgatagataccggcaagccgtttttgaattggacgcaggatccgcggaacccctatcgggaggctgtgtaggccttaagaccgccatcgggggcaagccccctcccacattttgaataggttcataaatcaaagtgtgggagggggcttgcccccgatgaggccctcagcccccacagagatcaaggctccaacccaatcccccgcaagatcacactggtcaccgtctggatcgccttctcgaactgcatatccgacaacggctggtgatcattcaaaatcttcacctggtgatcaaagtccgcatagtgctgggtcgaggcccagatcatatacagcaggctcgacggctccaccggcaggatgcgcttgtcctccacccactggcgaatcttcgcttccttcatcttggcccagtcgtacaggctttcatccagcgcctcacccagggtcggcgcgccgtggatgatttcgttggcccagactttcgaaccgtacggccgcgtgcgcgagcgctgcatcttggcgcggatgtagctgctgagcaccacccgggggtcatcgaaggtttcaaagctcagggcgtcctgcttccacacttccagcaggtcgaacagcaccgcgctgtacagctcgctcttggtggtgaagtagtaatgcaggttggagcgcggcagttgcacttcttcagcgatatcggccatggcggtgctgccatagcctttttcggcgaagattttctccgcagccagcaggattttttcgacgttgactcgacgaattccgatcttgtgattgcccataagggctccctgacgaagacatgccccagagactaccatccgctctagatcggggcgacaagcgaagtcgaaacttcgtacacttcacgctcctacccattgattggtattgcccaatgttgatcaagaaagccctgactgccgtcgccctgctcgcctccctgttgggcgcctcggccgcatttgcccatgcccacctgaaaaacgccacccctgctgccgacagcagcgtcgcagcgcccaaggacctgcgcctgaccttcagcgaaggcgtcgaagccaccttcaccaaggtgtcgctgagcaaggacggcaccgaaatcgcgatcaagggcctggaaacaccggacgccgacaagaaagtgctggtggtcaccccggccgccccgttggccgccggcacctacaaagtggtgtggaacgcggtctcggtcgatacccacaagagcaacggcgaatacagcttcaaggtcggccagtaacccgtggctaccctgctggtgctgtgccgtttcctgcatttcagcgtcgtgttgttgatgttcggggcctgcgcattcaggccctggctgctcggcgctgcaccgcaaccggcgctggaccggcaacttgagcggatcacccgtggactggcctggctggggctggggtccggcgtcgcctggctgttactgatcaccgcgagcatggccggcagttgggacgcggcgctgcagccggccacggtgcagctggtgctgggcaagaccttcttcggccaggtgtgggtgtggcacctgttgctgaacctgctgctggtgatcgtgttggccaaaccctggccgatggtgcgcctgccagtgatcgcgctgctgctggcgacactggcaccggtcggccatggcgccatgctggacgggctcagcggcagattgctgatcctcaatcaggtggtgcacctggtgtgtgtcggtgcctggctcggcggcttgctgctgttggtgttgatccagcgccaatccccgcctgttgcgctggagccaatcctgcgacgcttcagcggtgtgggttatggcctggtcgccggcttgctggtgactggcttgatcaacgtgcgcgtactcaccgggcaactgtggcccacgccgttattcaacggctttgccctgatcctgttgatcaaggtgctgctggtgctgggcatgttggccctggcgctgctgaaccggctgcgtatcgagcgctgtgaagaacgcttgggcagcctgaaggccagtgtgaagctggagtgggtgctggggattgccgccgtcgccgccgtttccctcctgggcaccttgccgccgatgctgatggttgactgaaacacaccgtcatcgggggcaagccccctcccacattgaacctccacaccgagcaggtcatcgtataacttctacttgacagcgcctgaaaacctcgcaaatatcgcacccaatgttgtacgacaacgtataacaaataataaaaacaacaaaagaaagggagcttcactgtgagttcactcgcgcgcaattcctccgtccgcctgggttttatcggtctcggcagcctggccttcacccttcccctcaacgcccaagccgaaggcttcgtcgacgatgctaaagcgacgctcaacctgcgcaacgcttacttcaaccgcaacttcaccaacccgagcaaccctcagggcaaggccgaagagtggacgcagaacttcatcctcgatgccaagtccggctacaccacaggcacggtgggcttcggcattgatgtgctgggcctgtattcgcaaaagctcgacggcggtaaaggcactggcggtacgcagttgctgccgatccacagcgatggccgcccggccgataacttcgggcgcctgggtgtggcgctgaaaaccaaattatcgaagactgaactgaaagtcggcgaatggatgccggtgctgccgatcctgcgctccgacgatggccgttccctgccccagaccttccgtggcggccaggtcacctccaatgagatcgccggcctgaccctctacggcggccagtttcgcggcaacagcccgcgcaacgacgcgagcatggaagacatgttcatgaacggcaaagccgcgttcacctccgaccgtttcaatttcggtggcggcgaatacaccttcaacgacaagcgcacccaggtcggtgtgtggtacgccgaactcaccgacatctaccagcaacggtatttcaacctgacccacagccaacccgtgggcgactggaccctgggcgccaaccttggctttttcaccggcaaggaagacggcagcgcgctggctggcgacctcgacaacaagaccgccttcgccctcctctcggccaagtacaacggcaacaccttctatgtgggcctgcagaaactcaccggcgacagcgtgtggatgcgggtcaatggcaccagcggcggcaccctggccaacgacagctacaacgccagctacgacaacgccaaggagaaatcctggcaggtgcgccatgacttcaacttcgtggtgctcggcattcccgggctgaccctgatgaaccgctacatcagcggcagcaacgtgcacaccggggcgatcaccgatggcaaggaatgggggcgcgaatcggagttggcctacacggtgcagagtggcgcgctgaaggatttgaacgtgcgctggcgcaactcaaccatgcgtcgggatttcagcaataacgagttcgacgagaaccgcctgttcatcagctacccgatttcactgctctaaaggtgacagaagcagtgcgacgattcgcacttgccccccgtggcggcggaccagaggcatatctgctgcctgacacactgccatcgggggcaagccccctcccacatttgagcaatgccagcctgaagagcgttgacaagccggggaatcaataacgatacttcggcaaagtcatacgacaacctacaacaacaatggaacctacatgaccaccctcaccaccccgcccgttccattcaaccgcctgctgctcaccggtgccgccggcggcctcggcaaagtcctgcgcgaacgcctgcgtccctacgcccacgtgctgcgcctgtcggatatcgccaacatggcgccggctgccgacgcgtccgaagaagtgcagacctgcgacctctccgacaagcaagccgtgcaccacctggtggaaggcgtcgacgccatcctgcatttcggcggcgtatcggttgagcgttcgttcgaagaagtgctcggcgccaatatctgcgggattttccatatctacgaagccgcccgccgccacggcgtgaagcgtgtgatcttcgccagttccaaccacgtgatcggcttctacaagcagggcgaacacctcgacgcccactcgccgcgccgcccggacagctactacggcttgtccaagtcctacggcgaagacatggccagtttctacttcgaccgctatggcatccagaccgtgagcatccgcatcggctcgtcattcccggagccgcagaaccgccgcatgatgcacacctggctgagtttcgatgacctgacccaactgctcgaacgcgccttgtacacgcccaacgtcggccacaccgtggtgtatggcatgtcggataacctcgacacctggtgggacaaccgctacgccgctcacctgggctttgcgcccaaggacagctccgaagtgttccgtgcccaggtcgagggccagccgcccgtagccgccgatgacccggccaaggtctatcagggcggcgcgttctgcgcggccggccccttcggtgattgacccatgaacgccgaattgattgtcgacgcgcgcaatgccgtgggtgaatgcccggtgtgggtgcccgaggaaaatgcgctgtactgggtagatattcccaacggcggcctgcaacgctggagcgccgccaccggccatctcgccgcctggaaagccccgcagatgctcgcctgtatcgcccgtaccgatgcgggcaattgggtcgccggcatggaaagcggctttttccagcttaccccgtacaacgacggcagcctcgacaccacgcccttggctggagtcgaacacccccgtgccgacatgcgcctgaacgacggccgctgtgatcgccagggccgcttctgggccggcagcatggtgctgaacatgggcttgaatgcgcccgagggcatcctctaccgttacgcttccggcgccgtgcccaatgcacaactggacggtttcatcaccctcaacggcctggcgttcagcccggatggccgtacgatgtacgcctcggactcacaccccttggtgcaacagatctgggccttcgactacgacatcgacaccggcacgccctccaaccgccgcgtcttcgtggacatgcacaactacctcggtcgccccgacggcgcggcggtagacgcagaaggctgctactggatctgcgccaacgacgccggcctgatccaccgtttcacccccgacggccgcctcgaccgctccctcaccgtaccggtaaaaaagcccaccatgtgcgccttcggcggcagccgcctggacaccctgttcgtcacttcgatccgtgacgaccagagcccccagtcgctgtccggcggcgtgtttgccctcaaccccggcgttgtcggattgccggagcccacgttcaccctctagctgcatcgctgtgccttgaatacaacaataacaagacaggaatgaacccccatggacttcaaacgcaccttgctcgccgctgcatgcttctccctcgccagcgccgcccacgccctggaaatcaagttcgccgacatccaccccgccggctaccccaccgtcgtcgccgaagaaaacatgggcaaggccctgaccaaggaaagcaacggcgaactgaccttcaagtacttccccggcggtgtgctgggctccgagaaagaagtggtcgaacaggcccaggtcggcgcggtccagatgacccgtgtcagcctcggtatcgtcggcccggtggtgccggacgtgaatgtgttcaacctgccgttcgtgttccgtgaccaggcgcacatgcgcaaggtcatcgacggcgagatcggcgatgagatcctcgccaagatcaccgattcggaattcggcctagtggccctggcctggatggacggcggaacgcgcaacctctacaccaagaaaccggtgcgcaagatcgaagacctcaagggcatgaagatccgcgtgcaaggcaacccattgttcatcgaagccttcaatgaaatgggggccaacggcattgccatggacaccggcgagatcttcagcgccctgcagaccggggtgatcgacggtgcggaaaacaacccgccgaccctgctcgaacacaaccacttccagaacgccaagtactacaccctcaccgaacacctgatcctgcccgagcccatcgtgatgtcgaaaatcacctggaacaagctcactcccgcccagcaggacatggtgaagaaagccgccaaggccgcccaggcggacgagcgcgtgctgtgggacgccaagtccgccagcagcgaaaccaagctcaaggccgccggcgtggagttcatcaccgtcgacaaaaagcccttctatgacgccaccgcgccggttcgcgccaaatatggcgcggcttacgccgacatcatcaagcgtatcgacgccgtccagtaacgccctccttctctagcaaggcccggcgcggtcggtatcgacgcgcccggttacggtgaacgccatgaagaatttactgctgcgcatcaacgaccgcctatacatgacctgcatctgggtcgccggcctctcggtactgggggtcgcgctgatcatcccctggggcatcttcgctcgctacgtcctcggcaccggcgccagttggccggagcccaccgccatcctgctgatgctgatcttcacctttatcggcgccgccgccagctaccgcgcgggtgcgcatatgtcggtggcggtagtgactgaccgcctgccgccacgccaacgccacatcgccgctatcgtcgcgcaactgctgatggccaccatctgcctgttcatgaccgtgtggggcaccaagttgtgcctgtccacctggaaccagttcatgagtgccatccccacactgcgcgtaggcatcacctatatgccgatcccgatcggtgggctgctgacgctcgtattcgtactggaaaaactcctgctcggcgaccagagccagcggcgcgtggtgcggttcgacctggtggaagaaaacgaaggggctgcctgacatggatgcattgattctgttgggcagttttatcgccttgatcctgctgggcatgccagtggcctatgccctggggatgtcggcactgatcggcgcgtggtggatcgacatcccgttccaggccttgatgatccaggtggccgggggcgtgaacaagttttcgctgatggcgattccgttctttgtactggccggggcgatcatggccgagggcggcatgtcacgtcgcctggtggcgtttgccggggtattggtgggttttgtgcgcggcggtttgtccctcgtcaacatcatggcctcgacgtttttcggcgccatctccggttcgtcggtggccgataccgcctcggtcggctcggtgctgatcccggaaatggaacgccgtgggtatccacgggaatttgccaccgccgtgaccgtcagcggttcggtgcaggcgttgctgacgccgcccagccataactcagtgctctactccctggccgccggcggcacggtgtccatcgcctcgctgttcatggccggcgtggtgccgggcctgttgatgagcgcctgcctgatggtgctgtgcctgatcttcgcgaaaaagcgtaactaccccaagggcgaagtcatccccttgaagcaggcgctgaagatcgccgcagatgccctgtggggcctgatggccatggtgatcatcctcggcggcatcctctcgggcatcttcaccgccaccgaatcggccgcgattgccgtgctgtgggcgttcttcgtgaccatgttcatctaccgcgactacaaatggcgcgagctgcccaagctgatgcaccgcacggtgcgcaccatttccatcgtgatgatcctgatcgccttcgccgccagcttcggctacatcatgaccctgatgcagatcccggcgaaaatcaccacggcgttcctgaccctgtcggacaaccgctacgtgatcctgatgtgcatcaatgtcatgctgctgttgctcggcacggtgatggacatggcgccgctgatcctgatcctcacgccgatcctgctgccggtggtgctcgggctcggtgtcgacccggtgcacttcggcatgatcatgctggtcaacctcggcatcggcctgatcaccccgccggtgggcgcggtgctgttcgtgggcgccgcggtgggcaaggtgagcattgaaaaaaccgtgaaggcactgctgccgttctatgcggtgctgttcctgatcctgatggcggtgacctacattccggcgctgtcattgtggctgccgagcgtggtgctgtgatgctgatcgaactggaagacaacctgacccacctcaccctggccccggccgtgggtggcagcatcgtcaattggcgcgtgcgagccagcggccagccattgttgcgccacagcgaccaacaggccctggacacgggcctgccgggcaaactcggctgttatccgctggcgccctggtccaaccggatcgccgaagggggtttcgataaccccgacggctggctggccctcacgccgaacagcctgaccgacccactgcccattcacgggtcggcctggcaacaagcgtggcaggtggtcagccagtcggcggacgaagtggtgctgcaactggtgtgcgacacaccgttcgcctatcgcgctgagcagcggttttgcttgcgcgacggcgagctgagcatcacgttgcgggtgactcatctggcggacaaaccggcgtggcacggcttgggattgcatccctacctgccgcgcacagcgcaaacgcggttgcaggccaaggcctcgcaggtgtggatgagtgccccgtcgaaactgcccacggagctggcaccggtacccgccgcctgggatttccagacgttgaagaccttgccggaaggcctggtggacaacggtttttgtcagtgggatggacattgcctgatcgagcaaccggagctgggctatgccctggagtgccaggccaccggcgccgactacttcctgctgtactgcccgccggggctggggttcttttgcatcgaaccggtgagccatccggtgaatgcccatcacctggcggggcggccgggcctgaaactgctggaacacaagcagtcggtacaactcaatttcaagctgaaatacatacaacatgtgggagggggcttgcccccgatggctgagtgtcaggcaacagatgtttgactgataaaccgctatcgggggcaagccccctcccacagttttgatttgcgttgtgtcagggtggagcgtttttcaggcgcccggcagtgtcgatactgacgaccaccgacaaccccggccgcaatcgctcgctctcggcctggttcgggtccaccgtaatccgcaccggcacgcgctgggcgatcttcacgaagttgccggtggcgttatccgcctgcaacaggctgaactccgaaccggtggccggggaaatatgctgcaccgtgccgtggaatttgcggtggttcaaggcatccaccgtaaaggtcaccggctggccgacctgcacgttgtccatctgggtttccttcatgttggcaatcacccacagctgcggcggcaccagcgccatcagttgcgcgccggagttgacgtaggcacccaggcgcacgccaatctgccccaactgaccgtcacgcggcgcagtgatgcgggtgttggacaggtcgatacgtgccagctccaccgccgcctcggcactcgctacggcggcttccagggagccacggttgacgatcaccgtctgcaggtcctgccgcgcgatttccaggctggcctgggcttgcgccacggcggcgatggtctgcgcattggcggcgcgggtcacgtccagctcgcgtttggacaccgagccgtcgctgatcagttcttcattgcggcgcaaatcggccgtgcttttgcgcgcctgtgcctggctgtccaccaaggctgcctggcgcaacttgatggtcgcttcggcgctgttgcgctgctgcaccacattggccagcgaggccttctgcaccgccagttgcgccagcgcctggtccaggcgctgtttgtagatgcggtcgtcgaggcgcaccagcaggtcgccggccttcacgtattggaaatcctgaaccggcacttcaaacacatagccgctcagttgcgggccgatgatcgtgacctgcccacgcaccagggcgttctcggtggtttccacggtgctgctgaacggcggcaattgccaggcatacagcacgatcagcacgccgacgatggcaatcgcggcaaagcccagcgatgagacgatgcgcacccgcagggagcggggctcggtgaccgaggcgccgggcggcgtggtgccttccggggtggcggcgatggcgttggtggtcgtggtggtggaagtcggttcggtcatgaagaagcgccgctgggttgaacgggaggggctgctgttttggtcgtgctcatcagccacaggctgcggataaagatccagatcatggtcagtatcgcgatgatcgcgatcagcatgaagacatcgttgtaggccatcacgttcgcctcacgggtcgccgccgtagccaggctgcgaatgcccatgaggttgcgcaactcggggtcggcgacaatgccgccgtaggccgagccgccgctttgcacccgcgcggccacacgcgggtcgagcagggtcaggtgctcgacgatcatgctggagtgatatttctcgcgcacgatctggaacgtgcccagcaacgccgcgccaatcaggccgccgaggttctggcagataccgaacatcaccgagaaactcaccaggttgcgcgggttggtcagcacgttcttcgtgcccaataccatggtcggtcccaggaagaacgtaccgccgaagcctagcaggaactggctgatatacaggttctgcggccgggtcaggttgctggaaaaactgtccatcaccgacccggtggccatcagtgccagggaaatcaccagcggcatcaacaggtgcgccgggttgatggtcaacgcactcaccgccagcccggcaatcgcccctgcgagcatcaccacatacagggtgtgcatctgctggtagctcatgttcaacatctgcatgaaacccacggcgccggtggactgctcggacaacaccatgcggatcaggatcaccgccagcgccaggcggatcatcacgccgctgcccagccagcgggtcatcagcatcgggttggcgcggttatgctcgatggccagcccggccatgatcagcaccagggaacaggccgaggcgatgccgatccacggtgcttccagccaccagtcgatgcgacccagggacagcacggcgcagagcaaggcgacaccggtggcaaggatggcgaaggtgacgaagtcgagtttttcaaaggtcttgaagcggtcgccgggcggcaacttgagcaagaacacgcagcccaggcagatcagcgccaggcccagctcgaacagatacagcccgcgccattcggcgatttgcagcaggtcttcggagaacagccgtgccaatggcaaggccaactgcgccgtgcccaaccccagcaccagggacttcaagcgccacttggccgggaaggcctggatcatgtagtacaaacccagcgaactcagcgccgcgcccaccatgccatgggccgcccgcaccgcgatggccgagctgaggtcgttgacgaacaagtggccgaaagtcaccagtgcgtacagcaccaggaacacctcggtaaatgcacgcagcccgaactgctggcggaacttcaccagcagcaggttcatgcacacattggtcatcacataggcggcgggcagccaggccatttcggcggtggtcgcgcccagtgcaccttgcaggtattgcaggttggcgatgaccagcgcgtttcccaacccgccagtaatcgccaccagcacgcccaccatcgcgaacagccaacgcttgtgcgtcgggtgcagcggcgtagacggcgaaccgggcaggctcgggcgctcgtggggctcccaggtgtggggggtgtatttgttcattcgatgactcaggtaaacccatactcagagacagtaaacctgagcggagttcatcttgccatgtcgagggcataattgatgcgaagaacaggcatcacctgaaatgtgcgagggcaagtcgactcgtcgccctgcccccctgggatgtcctgcgtattcagatccagccgagccaactccagtaggtcgcagcgaataccagcatcaacaggtagccaaccagcgtcaccagaacccccaccttggcgaactgccgcgccgtgaacgttccggtccccaggcacaccatgttctgcggcgcattgatcggcaggataaacccgtagctcatcacaaaccccaagagcatggtcatgcccaaccggctgaaatcccccggcaaggtctgcaacaccgcgatcaggatcggcagcaacgccgaggtcaacgcggtggcgctggcgaagcccagatggatcaggatcaggaacgcaccaagaatcgcaaacacacccagcggccccacctggtcaagcccggtatgcgccaccacttgcgcgcccagccattgcccggcctgggtggtcagcagcgccgttcccaggctgatgcctaccccgaacacgatcaccgttccccacggaatgcgcgactgcacatccttccaggtcatcacgccgatacccggcaataacaggaacaccaggccggcgtaggtggtcgaggtggtgtcgaaactgtgcaggcgcccttccgtggcccaggccagtagcagcaacaccgaaacgctcaacaggcgcttctgcgcgccggtcatcggccctatctccaccagcgactgcgccaccgcctctttaccgccggggatgctgtcggtctccggcggcagcaacttgagcacgaggaacagcaacaccgccgacatgatcaacgcccacggcgcgccggcaatcagccagtcgatccacgacacgcgctggccaagcatcttgtccatgaaaccgacggtgagcaggttctgcgcggcggcggtctggatgccgacgttccagatgctggtgccctgggccaccacgatcatgatgccggcggcgatattcgagcgtttgtccacgccgaacgcggcgatcacacccatcatgatcggcaccacgcaggcactgcgcgccgtggcgctgggcaccacgaggctgagcagcaccgtcaccgcaatcgcccccagcaggatgcgccgggtgctggtgccgacccggctcagggtcaccaaggcgatacgccggtccaggccggtgtgggtcatggctgctgcgataaacagcgccccggccaccagcgccagcgccgggttggaaaacccggtgagcgccatgctgatcgccgggctggtgccgatcacatgcgcggggtcctgcaacgacggcgcggtgcccagcagaaaggccatcagcgacgtgatcatgatcgcactggcttcataggacaccgcttcggtgatccacaccaccacggcaaacgcgaggatcgccagcatgcggtgcccggcgaccggcaagtcggcgggcaccggcaacagcagcaccccggccatcaccaacacggcgacgaccaggcccaggggtaatttgaaagatgccgcactcatgggccactccaaggctctagatcaggccttgagcatgggctaaaagcacctgcgacgtgttgacctaggccaacaactggctcaacacggcccgcaacttgccgggtttgaccggcttgttcagcaacggcgcttccaaccggcgcaacgccctgcggcactggtcggtgcggtcggcggtaatgatcacggccgggatgttcagttcgaaatgctcacgcaggtgcttgaccaccgcacaccccaccaccccatggtcgaggtgataatcggccaggatcagttccggcgccctgccctccaacgccagcaacgctccggcctggtcggtggcggtgaccacatcacagccccattgcccgagtagcgcgcgcatgctgtcgaggatgctcacctcgttgtcgatcaccagcagacgccgtcccggcagcgggttgccggtggtcggctgggctggcaactggctgatcggcagagggatctcggtgctcaacggcacctcgatactgaacatcgagccacgtcccggccacgagcgtacggcgatggggtaacccaggatctcggcgatccgctcgacaatcgccagccccagcccaacgcctttacggtccgctgcgcggccgacgtcgagctggttgaactcgaggaagatcgcctccagccggtcctgcgcaatcccgcgcccggtgtcccagacctccaggcgcaggcaatcgccacgcttgcgcgcgcccaacaggatgcaaccttcgtcggtatagcggcaggcattgctgaggaagttacgcaaaatccgcgtcagcaagcgcaagtcggtgctgatcgcatagcagcccgtgtgcacccgcaggttcaaccccgccgcctgggccaccgactggaactccgagaccagcggcgcgaacagttcgtcgaggcggtacagcgccacatccggcttgaccgccgcctggtcgagccgcgagatgtccagcaagtcggtgagcaagtcctcggcgccctccagcgcctgatgcgtgcgctccaccagcacctgctcgacgctgggcaactgccgttcgcgcaaggtggcaatcaacaagcgtgcggcgttcaacggttgcaacaggtcgtggctggcggcggcgaggtatttgtccttgctgcggttggcggcctgggcggcgtcgcgggcgtcgcgcaggtcctgttcgatctgctcgcgctgggcgatctgctgttgcaggttgtggttggcttccagcagttcatcggtgcgtgcggcgacccgctgctccaactcgtcattgagacggatatagcgcttgcgctcagcctccagctcatccagccgcgccgtgagttccgggtaatggctcttgcgcgccgactggtcgcccagccccagcaacccggcgagtgcgcgttgctggtcgtcagagagcttcgccatagacgacctcgacgtcacgctggctcgactccctcgggttggtgaggatgcacggatcgcccatcgcatgctgggacaggaacggaatatccgccacgcgcacgccatgcaggcccagggtttcgtggaagccgatcgcccgcttgagcgcgatcaaatgctccaccagccgcgcgcagatctgccggtgattgaggccgcgacagtcgatgccaaacgtctcggcaatcaccttgaaacgctccggcgccgagctgtagttgaacgccaccacatgctccaccagcaccgcgttgcacagcccatggggcaggtcgaggaagccgccgaggctgtgggacatggcgtgcaccgcgccgaggatcgcgttggagaacgccagaccggcctgcatgctgccgagcatgatcttctcgcgcagggcgatgtccgtagggttggcgatcatctgcaccaggttgccgttgatcaggcgcattgcctccagcgcatgggggtcggtgagtgggccgtggccggtggaaacgaacgcctcgatcgcatgcaccaacgcatcgatgccggtgcaggcagacaggaacgggtccatgctggcggtggtttccgggtcgatcagcgacacatccggcaccaccgccttgctgacgatggagaacttcatgcgttcctgctggttggaaatgatcacgaactgcgagacatccgccgaggtgccggcggtggtgggaatcaggatcagcggcgggctgggcacgcgaatggtgtcgacgccttcgaactcaaggatgctgcgcccgtgggccaccacaatgccgatggccttgccgcagtccatggggctgccgccgccgatggcgacgatcacatcacagtgatgttcacggtacacctcggcgccggtcattacctcttcgacacgcgggttgggcgagacggcgctgtacaggcagtagtcgatgccgagggcttgcaggctggcttccacatcggccacccaaccggcggcgatcacgccggggtcgctgaccaccagcaccttgcgcgcgccgaaggtcttggcgtagttaccgacgttgtgccggcaaccggctccaaagatgatttcaggcgagacgaatttacgcaggaggctcagatttgggctcattggaaagcctgtttttattattttggaagaatgcgctcaacactaaccgatccggctgcgaatgcaatcagaccaaagaggcatccttccgacagtacccgcgatcaacggctagcgaagtacatggtcacttcgaagccgatacgcaggtcggtaaatgcaggtttggtccacatgggggcagtcctcgggttgggccggaagattccggtggggtcattaatgcatggggggatggggtagcgaatgctactttcgaagtattaagcgcactgcattagtcgcgaatgtgcagagaccaaaatgtgggagggggcttgcccccgatggcagtgtgtcagtcaatatgtaggtcactggcataccgctatcgggggcaagccccctcccacattggacagcatttcaagtcaggtctagaagaaacccagcgggttgatgtcgtagctcaccagcaggttcttggtctgttggtaatgatccaacatcatcttgtggttctcacgcccgacgcccgattttttgtacccgccaaacgccgcatgcgccgggtacaggtgataacagttggtccacacgcgaccggccttgatcgcccggcccatgcggtaggcgcggttgatgtcgcgggtccacaggccggcgcccaggccgaactcgctgtcattggcaatcgccaacgcttcggcttcgtccttgaaggtggtcacgcccaccaccggcccgaagatttcctcctggaacacacgcatcttgttgtggcccttgagcagggtcggctggatgtaatagccgctggacaggtcgccttcaaggcgctcggctgcgccgccggtgagcagcaccgcgccctcctcctgggcgatcttcaggtaggagaggatcttgtcgtattgctgctccgaggcctgggcgccgaccatggtctcggtgtccagcgggttgccgcgcttgatcttgacgatcttttttatcacttcggccatgaacggttcgtagatcgactcctgcaccaaagcccgcgacgggcaggtgcacacttcgccctggttgaagaacgccagcaccaggccttcggcggctttctcgatgaattgcggttcggcctgcatgatgtcttcgaagaagatgttcggcgacttgccgcccagctccacggtggacggaatgatgttctcggccgccgcatgcatgatgtgcgcgcccaccggggtggaaccggtaaaggcgatcttggcgatgcgcttgctggtggccagcgcctccccggcttcgcgaccaaagccctgcacgatgttcagcacgccgggcggcagcaggtcgccgatcagctcggcaaacaccatgatcgacagcggcgtctgctcggccggcttgagcacgacacagttaccggcggcgagtgccggcgcgagtttccacgcggccatcagcaatgggaagttccacgggatgatttgcccgaccacgcccaatggttcgtgaaaatgataagccgctgtgtgctcgttgatctcggcggcgccgccttcctgggcacggatacacccggcgaagtagcggaaatggtcggcggccaggggcacgtcggcgttgagggtttcgcgcacggccttgccgttgtcccaggtctcggccacggccagcacttcgaggtgttgctcgatacggtcggcgattttcagcagcaccagggcgcggtcctgggccgaggtcttgccccaggcatcggcggcggcgtgggcggcgtcgagggccttgtcgatatcggcggcgctggagcgcgggaactcggcgatgacgtcaccggtgaccggcgaggtgttggtgaagtactcaccgttgatcggcgcgacgaactcaccgccgatgtaattgccgtagcgcggcttgaagctgacgatggcgccgggggtgccaggttgggcgtagatcatggtgaggcctctgcttattgttgggtgttgatgggctgcatctgggtgcgttcgtagtgcgggtacaggtgggtcacgctgcgggtcagttcatagcggctctggttgatgcccgcgaatcgctcggggatcgggctgcggatcagctctggcatgtcgctgccatgggctgccccgtcgcgtagcaattgatcgagccaggtgaggtagtcacgcatctgttcgaagggtttggcgtcggtcgcaatggggccgtggccgggcacgatcagggtccagggcaagccttgcagggtggcgatgtccgccagccagatcgccagccccggtgaatggggcgtggtaagcgcacgttggtagaacaccaggtcgccggcaaacagcacgccggtcttgcggtcgaggatcgccaggtcggcgccggtgtgcccgcgcagttgcagcagttgcaggtcgtggctgccgaagtttttcacaccgggctgcagcgtttcgccgggcagtaccacttcggtgccgcgcatccagtcgccgaccatgcggtacaggttctcggccatgctgtcgccctgctcatgcagcaaatcctgggtaccggccagggcgccaatcggcacgtccttgaaggcttggttacccagcgcatggtcgggatggtggtgcgtcagcagcacctggatcaccggtttgtcggtgatgcgggcgatggcctggcgcagggcttcgccgtagcgcctggacggtccggtgtcgatcaccaccacgccgggctcggtgacgatgaacccgacattgacgatattgccgccgttgtccttggcgaaattgtcggtgctgccttccagcagccaggtgttgtcggcgatcaaacggggcttgagggcgtaatccagatccgccagcactggcaggctgaacagcagcagccacagcagaatccagcgcaggttcatgggatggccgcctcgaactggctaccgctggtgtcgcgcagggtcaggcgcgtggggccgccgccttcgatgtcgaaagccaggctggggttttcgctgaccgccgggaacagttccaggcgtgccagcagttggttatctgcgccgcgcagctcggcctggttgatgaagaattcggggatgccgctgaccatgccgttatccatcggatgggcgacttgcagtttcacgcggctgaactcggcgcgtgggtaacggccgccgagcacttcgcccaggtgttcttcccaacccggttgcgtgcgcaccacgctgggcgccgtgcagccaccgccagcagcatcgatcaaggccgagccgacatgccacatgccatctttggtgagcactgctgcacgcagcggcgtggcctgttcgatacgaatccgcagcgacagccacggcagcaccagcccctgcggctggaaatcgacgatctgcggcagcgggttcagctccgcccaggcgaggatcttgactacgtcgcccttgaacgcccgcgcatcgatctccagcggcacctggcgcgcatcctcggcgaacggcggcgccaagagcctcacgcgctcatcgaacacaaacgctgcattgtcgagaaagcgctggtgatagtaggcccacatcaccgagggcaccgggtccacgggcgcgccccaggccagcatcggcacacagcacaaccaccacccgcgcaggcccatggcttactcctcgacgtgcacgctgtcgaggtaggtacgcaccgcccacagggcttcctggctgaggtagtcggccattttcggcatgtacacccggccatcgcgcacggcgccgtggcgcacgcgctccacaaaccattcatcgccggcgtcgccggcatcgagcatgcgcaggtcgggagcgatgccaccggacttggcttccaggccatggcacgccgcgcagttctggttgtaggccgacgcaccgacctccaccgccttgtcatgctcgggtgtggtgcgataggggttggtggcggcccagccatcggcgtccagcggtacgccggcgtccttgatcggggtgaggcctttggtttccacggcggtgggcgtcacgttgccgtgggcccaggcggaacctgtactgattgcaccggcgagcaggcaggcggtcatcaaggcgttgcgttttgttgtcattatttttccctcgggagtgcacgcaaaacctcttggcagaggctatggcaaccatcttaggaagcacccggcaggacccgtatgctgctttggtgggcgggttctcatccgttggtagcaggccttgtggggcactgctaaatcagaggcggttcgggaaattgtcccggcaacaccgggactttttccgtattcgccacggcgttcacatcgcaccctgtgcaggccaaaacctccactgggaactgcaaccatgacaataagatcgctacccgccctctcgccgctgagccttgccgtgcaggccttcctgctggttggcagcctgtccttgagtgcggccagcttcgccgccgccgagcctgccaaacagacccgcaacgtcacctgggaagacatcgccaacgaccacctgaccacccaggacgtgctgcaatacggcatgggcaccaacgcccagcgctggagcccgctggcgcaggtcaacgacaagaacgtgttcaagctcacgccggcctggtcctattcgttcggcgatgagaagcagcgcggccaggaatcccaggccatcgtcagcgacggcgtggtatacgtcaccggctcctattcccgggtgttcgcccttgatgcgaagaccggcaaacgcctgtggacctacaaccaccgcctgcccgacaacattcgcccgtgctgcgacgtggtcaaccgcggcgcggctatcttcggcgacaagatctacttcggcaccctcgacgcgcgcctgatcgccctcgacaagaacaccggcaaagtggtgtggaacaagaaattcggcgaccacgccgccggctacaccatgaccggcgccccggtgctgatcaaagacaaggtgaccggcaaggtgctgctgatccacggcagctccggcgatgaattcggcgtggttggccagctgtatgcgcgcgacccggacaccggcgaagaggtgtggatgcgcccgttcgtggaaggccacatgggccgcctgaacggcaaggacagcaccccgaccggcgacgtcaaggcgccttcgtggccggatgacccgaccaccgaaaccggcaaagtcgaggcctggagccacggcggcggcgcgccttggcagagtgcgagcttcgatgccgagaccaacaccatcatcgttggcgccggcaaccccggcccgtggaacacctgggcgcgtacctccaaggacggcaacccccacgacttcgacagcctctacacctccggccaggtcggcgtcgacccaagcaccggcgaggtgaagtggttctaccagcacacgccgaacgatgcctgggacttctccggcaacaacgaactggtgctgttcgactacaaggacaaggatggcaaggtcatcaaggccaccggccacgccgaccgcaacggcttcttctatgtggtcgaccgcaacaacggcaagctgcagaacgccttcccgttcgtcgacaacatcacctgggccagccacatcgacctgaagaccggccgccccgtggaaaacgaaggccagcgtccagccaagccattgccgggcgaaaccaagggcaagccggtggaagtctcgccgccgttcctgggtggcaagaactggaacccaatggcctacagccaggacaccgggctgttctacatcccgggcaaccagtggaaagaggagtactggaccgaagaggtcaactacaagaagggctcggcgtacctgggcatgggctttcgcatcaagcgtatgtatgacgaccacgtcggtaccctgcgggcgatgaacccgaccaccggcaaggtggtgtgggagcacaaggaacacctgccgttgtgggccggcgtactggcgaccaagggcaacctggtgttcaccggcaccggcgatggcttcttcaaggccttcgacgcgaagaccggcaaggagctgtggaaattccagaccggcagcggcatcgtctcgccgccgatcacctgggaacaggatggcgagcagtatatcggcgtgacagtcggctacggcggcgcggtgccgttgtggggcggcgacatggcggagctgaccaagccggtggcacagggtgggtcgttctgggtgttcaagatcccgagctgggacctgaaaaccgctcagaagtaacctcaccctatatgccggggtcatcctttgtggcgagcgggcttgtcccgcgttgggctgcgaagcggcccccggcttttctccagccccaacgagccgtcaggttttggggctgctgcgcagcccaacgcggggcaagcccgctcaccacagcaagcccgctcaccccaggatccccagaggtctcgcgatgaaatatctgccctttttaatcctgctatccctgcccttggctcacgccgacgagggcgacgacgcccccctggtcatcaacggctgtaccattgccgaacacagccaatgccccggcgcccacctcaagggcgccaacctgagcaatcaagacttaagcaaaatgaacctggccggcgccgacctgcgcgacgcagacctgcgccacgccaacctcgacctggccaacctggaaaaagcccagttgcaaggcgccaacctgacccgcgccagcctgcaacaagccaacatgcgcctggcggatttcaccggtgccacgctgatggccgtgcaaggctgggggctgtttgcccagggcgcacaatttgaaaacgccaacctcagcgccgcctacctgcaatttgcccggttgtcgggggcgaagctgcaccaggccaacctgcgggcggccgacctggaaatgacctggctgagcaaggccgacctacaaggcgccgacctcagcgacgccaacctgcaagaagccaagttcggcgaaagcaacctggagaaagccaccctcaccggcagccgccagcactatgcgaatttccaggatgcgaacatggaaggttgcaaggactgcccgaccacctgggaccgttaacccgccacccgcaccacccccatgtcgatacccaaatgcaccaactcggcatgggaactcacctgcaacttactcttgagcaaggtcaggtgattggacacggtcttgctgctgatactcaactgagcggcaatcgcgcgcgccggggtgcccttggcgagcatcaggaaaatctccagctcacgctgggtcatgctttgcaggcgccggtcggtggggtggtacgccagctgggtggccaggtcctgttcgatataggtgtggccgtcaagaatgcgctccaccgcatccagcatcaccgccggcaacgcgcttttggtcaggtagccggacgcaccggcctccaacgcctggcgcaccaagggcaactcagcatgctggctgaaaaacagcacgcgcaattgcggcaagcgctggcgcaggcggcgggtggtttccaggccgctgatccccggcaggccgaagccgatgatcaccaggtttggcaccgcttcgtgcacccgcgccaaggcatcctcgccactcgccgcttcgcgcaccaccacaccgggcagcccgctgcgcaatagcccggcgtaacccaggcggaccacggcgtgatcatcgaccagcaggatattcatagtgcctccaatggcggtgcctctggccatgctagaaccccggggaccaatgggacctactactttggtactggttttgctgtctatcgtcgcattcccaaggcagcaggactggcgtgtaatgggcgcataacgataaggattggatccgccatgctgcccgctcgactgccccttgcggcactgttgtgcctgttcatcacgtacgtacaggccgacacgccactgttttccgccgatggctaccgcaccagcctgtaccgcagccccacgcccgaacacctgcctggggcgatcatcgtcgacaccccagccctgcaaaccctgttgacccagacgcccgcaccggtactgatcgacgtgtaccgccgcccgtggctacagggccgcttcatcgaagaccagccccacgccaacctgcccggcagtcactggctggccaataccggcgacggcgacctcacgcccgagtggcaaggttactttgtgcgccacctgtacaagtacacgggcggcaacctggcccgcccgctggtgttctactgccgcgccgattgctggctgagttggaacgcggtaaaacgggccgccaacctgggctataccactgtgtattggtaccgcgatggtttggatgcatgggaagcggcagacctgccagtaatggctgcgacacccgaaccctttgaataaaaaaccacaacaagaaggtgaacggccatgtacaaaattctgattgccgacgatcacccgctgtttcgcgaggcgatccacaacgttatcagcgacggtttccccggcagcgacgtgatggagaccgccgacctggacagcgcccttgcgctgacccaggaacatgacgacctcgacctgatcctgctggacctgaacatgcccggcatgcacggcctcaacggcctgatcaacctgcgcaacgagtcgccgaccattccggtggtgatcgtctcggccgagcaggacaaacagatcgtgctgcaagctatcacctacggcgcggtgggctttatcaccaagtcatcaccgcgcctgcaaatgaccgaggcgatccagcagattctcaacggcaatgtgtacctgccgccggacatcatccgcacccagaaaaacactgggcagcggcgcatgaacgacagccctgggtttgcccccgagctgttgcaggcgctgacacgcaagcagctgctggtgttggagcggatgaccaagggtgagtcgaacaagcagatcgcctatacgctggagattgccgagaccacggtgaaggcccatgtgtcggcgattttgcgcaagttgaatgtgcataaccgcgtgcaggcgatactcagtgccggagatatcgatttcggctcgtacctgcgccgctgacggtctgacacaccacaaatcaactgtgggaggggcggtgcgacgactcgacttgcccccgatggcagagtgtcagtcggcacatgcattgactgatccaccgctatcgggggcaagccccctcccacagttgatctgcatttggtcaggtccggctgagcaggtggctcatggcggttttcagcttcatgggcctgacgggcttgtgcatcaaggtatgccccaactcacgnnnnnnnnnnnnnnnnnnnnnnnnnnnnnnnnnnnnnnnnnnnnnnnnnnnnnnnnnnnnnnnnnnnnnnnnnnnnnnnnnnnnnnnnnnnnnnnnnnnnnnnnnnnnnnnnnnnnnnnnnnnnnnnnnnnnnnnnnnnnnnnnnnnnnnnnnnnnnnnnnnnnnnnnnnnnnnnnnnnnnnnnnnnnnnnnnnnnnnnnnnnnnnnnnnnnnnnnnnnnnnnnnnnnnnnnnnnnnnnnnnnnnnnnnnnnnnnnnnnnnnnnnnnnnnnnnnnnnnnnnnnnnnnnnnnnnnnnnnnnnnnnnnnnnnnnnnnnnnnnnnnnnnnnnnnnnnnnnnnnnnnnnnnnnnnnnnnnnnnnnnnnnnnnnnnnnnccggctgagcaggtggctcatggcggttttcagcttcatgggcctgacgggcttgtgcatcaaggtatgccccaactcacggatctgctgcttcaattcattgctgtagttggcggtgatcatcaacgccggcaccgcgctcccgcgccgggcgttaatgcgggccacggcgtccacgccgttctggtcgtcgtccagatggtaatcggcaatcaacaggtccgcctcggcatggtagttgtccacctgccgcgccaggtcctgttccgacagcgccgtgatcacccggcagccccagccttcgagcaaggtacgcatacccgcgcagatcgccgcgtcgttatccagcacccacacccgggcaccttgcaggcgctcgagcaacggctcgctcatggaaggcgccggcagcgacttgggggccgtggcgctcaacggtacctccaccgagaacatcgagcctttgcccggccaggatctgacgctgatgcgatggccgagtatcccggcgatcttttccacgatggccaggcccaggcccaggccgcggtcctggtccggtcgctgcacgtcgccgcgcttgaactcctggaaaatttcctccaagcgctcttgcgcaatccccatgccgctgtcccacacctggatcaacaggcgctgctgctgacgccggcaacccagcaccacccgcccctggtaggtgtagcgaatggcattgctgagcaggttgcgcaggatccgcgccagcaactggatgtcgctgcgcaccaacgcggagcagccgacaaagtgcagcgccaagccttcggcgcgggccagttgggtgtactcggcggcgaggttgtcgagcaattcactcaaggcgaacggcgcgatatcggccttgatcacgccagcatccagtttggaaatatccaccagggtccccagcaggttttccacgtcttccagggagttgctcacattgcgcaccagggcttcgctggggcgttccagcaaggcactggtgaacagccgcgccgcattcaacggttgcaacaggtcatggctgacggcggcgagaaacttggttttcgacaggttggcctgctcggcctcgagcttggcttcgcgcaggcgggtttccatgcgccggcgctcgtcgatttccttgagcagttggtcattgagcgacgtaagctccgaggtgcgctgggccacgcgctgttccagatgctggtaggcctggtgcaaggcttcggccgtgcggcggcgttcggtgatatcgcggatcaacacgaagatccccaccacctcgccactggccagcatgttcggtacataggagcgcagcatgtagcgttcctggtggttgatgttggtttcggcgaactcaaaggtcacgctctcccccgccaaggcacgggcgacgtaggcatccaggcgctggcaatgctgctcgctgtgcacttcgcgcaggctctgcccaagcatcatgccgcgcggccagcagtaccattcttcatagaccttgttggtgaactcatagaccaggtcggcattcaagtagccgatcagcgccggcacgttgtcggtgatcaggcggatccagcgctcgctctcctgggctttctgcgccgccgcctgttcgccacgcagggtttcggcgcgcagccgggcgttgatcagcaggtggttgctggccttgagttcggccatcgcctggttcagcgcgtcggtgcgctcgcgcacttgctcggccagcaccaccgaatgctggaaggtggtgtaggggttgttgccctggggcatgccggactcgatgcgctcgatcagcgccgcattgatccgcgccagcttgtggttgtcctgttgcagccgggccagttgagcgggcaggtcagcgccggcctcgggcaatggcgaccccggtgaaggtctggttgatgtgcatgccattgaactgttctccgtaggtattgaaacccatcacccgctggtcccgcaagtaaccgccgagctgttcgagggtgccgttgtcctccagctccaggcggcgcaaaaagcaatcgcagccgatggtcagcaacaggtcgccgaggcgcgcttgcaggccgtcgaacagagcctgcaggttcggcagcagcgggccgggcgtcatcaccgtcagcacgatgccgttttccaccgcgcagtagaaactcaggctgaggtcctcatgcacctgctggatagcgcgcacgtagtactggtcgtggatacgcaccgccagcgggtgggcggcgaacgtgcggtggtcgaggtcggccaccgccacgccgatatgccgcgcgtactcttcggcggcgggctcggcgttgagctcgaacacgcggcgtgacgcgctgtcggcgccggtcaccaccagcttttccgtgcgcggcaggatatggtgggtggtgaacacctcgaaatccagccaggtgttgaccagcatcaccaccgccgcgccgctgtggaacacgccgttgaagtacacgtgggtgtgggtgaggaagttgtcgtcaccggccgaaccgccgaaatgcgggatatccccaagagccgcgctaagggcggcgaggaccatttcttcgcggctggacaggccgtcaagcagggtcagcgcaaacgtgttgcccttgatcggcgccagggtgttgctgcgacagccgccgaccagacgttcgaccatgtcctgggcaccgatcaggctgaagtgctcgacctgatcgatcagctccgtggcgatggaaaagtgcgcatggttgaagcccaccgccgtgatgcagttgcgaccgtagccttggggcgtgatctcgccggcgctggtgcagccgaccacacgcaccttgccgaagcactgttgcagggcctggccaagggcctggaggtcgtaggacgcggaacagaaaaacagcacaaaacccaggtacgggtgcagcagttgctgggccaattcctcggcggcctgcccagcatcggtggcctgggacatggcgctgactacgccttcactgttgtgcatcgttgcctccccctctgaagcatcagtgtacgaagggcctgggcgtggacctatgctacttgggtactgggtggggggattcgatgggatgggatgaggctttcaagaccactctctcaaaagccaatggagatccaatgtgggagggggcttgcccccgattgcagggtgtcagtcgatgcatgagtgattgatccaccgctatcgggggcaagccccctcccacattttgattgcatttcagatggctaccatgccattgccgtcgtccttggtcttgccgtaggacagggccaggcggttcttgccgaccttgtacgagccttgtaccaggtagccattgctgtcgacgttgcgcaacgtggcctccccggcattgttagtgaaaaacgggttgatgcccttggcctggaaccccgaaccggtcagcggcaaaccgcccatcttcgcctgcacgccgtagcccaggcccttggaggtgacggaggccacggtggaaaggcgttgatgtagccatcggtggagaaggtggtttcgtccttgtcgtacaacatgatttcggcgtcggcgaatgggctgaagcccaggccgaggataaaggcaggcaacagacgcagcggggacttgatgtcggaggcgattatcaaaaggcggtgggccatggcatacgctgccttggccctgatttgcggatgctttggaggggcagcgggtgcccggcaagttcggtttagtccaggcccggcacttaggatgtaagaccggccttgaccaacatgcccacggccaccacgacacacaggccggcaaaaccgacctgcaaggcacgcgcggggatcaccgaacacagacgccgaccggcgagcatgccgacgatactcgcggcgataaacacccaacccaccggctcgatgcgcacaccggcatgcagcgcgccggccacgccgatcaacgacagcaggctgatcaccatcagggaggtggcaacgatgccacgcatctgcacgtcggtgagctgcttgaacgctggcacgatcaggaagccgccgcccacacccagcaggccggacaccgcgccggtcaccgcgccgagggcggccagggtcgcgctgcatttggcggtccaggccaggcgcccggtctgctggtcgagcatgcagttcttctggccccaggaggcggtcccgtgatcactcggcccggcctcgcgtttttcgcgctgcaacatgcgccaggccaccagcaccatcaatgcactgaacagccccatcaacagggcttccggcaactggtgggcgaggtacacccccaccggcgaaaacagcgcgccgagcaaggcgatcagcaacgcggcgcgataacgcaccaggccatggcgcaaaccatcgaccgcccctaccgccgccgccgcgccgacggcgagcaacgacaccggcgcggcctgggtcatgctcaagcccaggcccagcaccagcgccggcaccccgaggatgccgccaccggcgccggtcaggcccatgaccaggcccatcaacaatcccaacacactggcgagcagcattcagtccaccttgctcaggcgggtcagccattcgcggcccttgagcatgccgttccagtagaaccacggcagcagagtcgccttgaggaaccacatcgagcgacgcgcctgggtcgggtccaggggaaaggtcggcagcagcttgccgccatagccgaactcggccagcaccaccttacccttctccaccgtcagcgggcaggagccgtagccgtcgtatttgagcggcaacggcgcctgtttgcgcagggccagcaggttctcggcaaccaccacgatttgcttgcgcaccgctgcggcggtcttggcgttggtggtgccgcacacgtcgcccaggccgaagatatgcgggtaacgcaggtgctgcaggctatgggggttcacttcgcaccagccggccgcgtcggccagtgggctttggcggatgaaatccggcgacacttggggtgggaccacgtgcaagaggtcgaaggctttctcttcgatgcggacgttgccctcggtgtccttcacttcgaaccaggccttgcgggctgggccgtcgactttcaccaggttggcattgaatgccaggcgggcgttgtacttttccacgtacttcatcagcggcggcacaaaggtcgccaccccgaacagcgcggcgccggccaggttgaattcgacgtcgatgtgtttcagcgtgccctgtttgagccagtgatcgcaggacaggtacatggctttttgcggcgcacccgcgcatttgatcggcatcgccggctgggtgaagatcgccttgccgcccttgagttgctgcaccaactgccaggtgtaagcagcgtgctggtaactgtagttggacgtgacgccatgtttgcccagggtgtcttgcagcccctcgaccttctcccaggccaggcgcaggccggggcagacgatcaggttgttccaggtgacgcgctggccgctgtcgagcaccagggtctgctcgtccggcagcagttcgctgacggcggcctgtacccaggtgacaccattgggcaacacgtcggccagtgggcggcgggtctttttcacgtcgtaggcaccgccgcccaccagggtccaggcgggctggtagcagtggtggtcgctcggttcgatcagggtgatatgcaggtgggggtcgcgcttgagcaggctggccagcaggccaatgcccgccgagccgccgccgatgactacgatatcgccactgatggtagggccccagtgttggtcggtcatggtctatcgcctttgtaatacatgcacacaagggtcgctgccggatggcgtcacgcccagctttttatgaccgcgccgcaatacaggccggacagggtcttcatcacttgaatcacttcatggctggccagcccgtagaaaatgtatttgccttcccgacgagtggccaccaacccctcgtcgcgcaggatgcccaactgttgtgacagcgtgggttggcgcacaccggtcagggcttccagctcgccgacattgcgctcgccctgggtcaactggcacaggatcagcaagcggtcctcattggccagggccttgagcaaggaacaggccttggacgccgatgcgcgcaactgggcaacttcgccttcactcagagtagattccatttgcctcgggtcctttgtgtcacttaagctcaaaacattatgtgaaaacgtaaactgattgtaaccacttttttcttcatcggggacgtccgccatgccagcgttgattcaagcctttctggacgaggcatcgtcgacctacacctacgtcgtctatgaaaccgacggcggcccgtgcgccattgtcgactcagtactcaactacgacccggcctcggggcgtaccgataccgcccaggccgataacgtgatcgcctttgtgcgcgagcacgctttgcaggtgcagtggctgctggaaacccacgcccacgccgaccacctgtccgccgcgccctacctgcgccgtaccctgggcggcaagatcgcgattggccagtccatcagtaaagtccagggcgtgttcaagcacctgttcaacctggagccggagttccgtgtggatggctcgcagttcgaccacctgtttgcaccgaatgaggtgtttcatatcggtaacctcaaggcccaggcactgcatgtgccagggcatacgccggcggacatggcctacctgatcgacggccgattgatcctggtgggcgacacgctgttcatgccggatgtcggtaccgcccgctgtgatttcccgggaggggatgcacggcagttgtatgcatcgatgcgcaagttgctggcctttccagtggaaaccgagttgtacgtgtgccatgactacccgcccgaaggtcgcgaggccaaatgccggaccaccgtggccgagcagcgcgcaggcaatatccatgtgcatgacggcgtggatgaagcggcgtttgtagaaatgcgcaccaagcgcgacgccgggctgggcatgccgacgctgttgctgccggcgatccaggtgaatgtgcgggcgggcaacctgccccccgccgaagataacggtgtggtgtacctgaagattccgctcaaccagctctgaatcgcgcttactcgaagtacgacgacttggagggcgcaagccccgaccacaattcgtcgatatgcttgaagccccactcctcggcgctttcacggctgatgatcttgtccggttgctcagccaggttcaccaccgactgggaaatcggcaagcgtgaacgtgccgaaaagaacaccttgaccttgggcgtcagcagcgacgtagggctttgttcgacaaccacgccaatgcgcccgctttccaggcgcaccaaggcgccgaccgggtaaatacccacgcaacggacaaacgcctggaacacccgggcatcgaagtgtcccttccattcggccattttctggatcgcctccgcgggcccccacccatgtttgtaggggcgctccgaggtgatcgcatcatagacatcgcataccgcgcccatttgcgcgaacaggctgatctggtcctgcgccaggccaaggggatagccgctgccgtcgactttttcatggtgatgcaggcacacatccagcaccagggcgctgatctgcgggcatagccgcaacatctgcgcgccttccaccggatgctgacgtacggtgcagaactccgtctcggtcagcccggccggcttgctcaagatctgctcgggaatggccattttcccaacatcatgaaacagcccggccaacccggcttcctggaccaactccggcgacaggttcaattgccgcgccagcgcgatcatcaagccactgaccgcgacagaatgcatgtaagtgtattcattagcctttttcaggcgcaccaggctgagcaaggcatggggatggcgcagcatagagcgggagatgtcctccaccaggctggccacttgacgaacctccaccgcgcgccccatgcgcaggtcactgaacatactgatcacggcacgcttggcaaccgcacacaccttcacggcacgcgccacctccgctttcatctctgagggggctggcaccacaggacgcggtgtggcaggttgtttgacggtgaccggcgccgctggggccggttgtggttcgtcgcagccttttgcggtatcgatccagacccgctggacctgcgacgtcaacaaacgctgccggtcctcttcacggtccaacaaaaagctgctcttccagaacccatggccgatccatggcccgtccagtttgtgcaggtacatccccaggatcacctgggaacaagcaatgcacttcagcatgtatcatcccccccaaggcatgacctgcttggcgatcaactcactgcaaacttcgccacgatctgtttcaagtccacggcgagcctggacagttcctggctggccaccgatgtctgaccggcggccgacgaactctggatggacaggtcgcggatgctgatcaggttctggtcgacggaacgcgccacctgcgcctgttcttccgacgcggttgcaatcatcaggttacgctcattgatgtcggtaatggcttgggtgatctgggtgatcgccacgccggcttcatgggcaaccttcaacgagtccaccgcttcattgcgattgaggaccatggaggccaccgcttcgctcgaacagctctggattttcgcaatcatctgttcgatttcctgggtcgatgtttgcgtcctgtgggccagcgcccgcacttcatcggcgaccaccgcaaagcctcggccctgttctcccgccctcgccgcttcaatcgctgcgttcaacgcaagcagattggtctgctcggcgatggagcgaatcacctcgaccacccgggcgatgtcctgggcctgtttggccagcccttcaacttccaccccggtttgctgcaccgtggagctcaacttttcaatcgaagcgatggtttgcgtcacccgctccatccccacgcttgccgaacgctgggagtcctgcgtcgactgggacgcagacaccgcattccttgccacctcctcgaccgctgccgtcatctggttgaccgccgtggcggcctgatccgtctccaggctttggcgctcaatgccggcagtggactcccgggtgatcgcactcatctcctcggctgccgacgccaactgcccggacgcctccgagatatgctgcaacgtgcttttcaggttcatctgcatggtagcggtcgatttttgcagctcggtcagttcgtcattgccgctgatggtaatggccacacgcaaatcgccgtcggcaatcttgccggtcgacaccagcagctcccgcaccggattgataatgctgcgggtcagcaagcgggccaccaccacggcgatcaacaccgaactgaccatcaacacccatgtgaacaaccgcgccgcatcatgctcactggcggcggcttgcaccgcggtcttcgagccctgttcattgatcgcaatcaaatcgctgatggaggcctgcacttggcgagcaatggggccgttgacgtcgcgcaaatacaccgccatttgttccgcggaaaagctggaggcttgcgcgaggaattcatccatcttctggctgtagttttttatctcactcagtgcctggtcgtacttggtacgctcctcggggctcgataccagcgttccataatgctcggcaacttgcagcacttcggcgcgaaccgccttgagtttttccagggaggcagggtccttgtccgcgtattccatggcgtaacgccgcaggtccaggcgaagtttgtaaaacgtcgaatctatctggccggccaggcgaatactgggcagccaattgttttctatttcgaccgtcgatgaataaaccttatcgacttttatcagcgtcatcgcaccttgtattaacagcaggaaacacaccacaccgaagcacaatgtggtacgaaagttcaacttcaaggctctcatggacatctcggctcacccttccccttggccgtgctgtacacggccttacgggtacaactttgtttaaccgagtgtgaaaaaaacgtgactacttacgcatttttttatgaatagtggcaaataaacatgacgcagatcattgcttagctaaccatcataattaacggctgttgcgactctccgacattcataccattagtccatcccgtggtaacggcagcgctgttttatatcgaacttgtttaagtgcaaaactggaccggatattggcgacgcctggcaccttggtcaaaaaatccatcatgaaacgctccagcgactggatcgtcggcaccaatacccggataaggtagtccgggtcgccggccatcaggtagcactccatcacttccgggcggtccgcaatcgccccttcgaactgctgcaacgccagctcgttctgcttttccaggctcacgtggatgaacacattgacgtgcaaccccagcaggtcggcgtccagcagcgtgacctggtcgcgaatcaagcccagttcttccatcgccttgacccggttgaaacacggcgtgggcgacaggttgaccgagcgggccaggtcggcgttggtgatccgtgcattctcctgcagggcgttgagaatgccgatatcggtacggtccagtttgcgcatgagacaaaatcacctgtttattatgtttatgcagtttttttatccgcaaatgatcctgagcgcaacgaaacagagataaatattcttctacgccacgcctatgattgttgtaggacaagatttcccctacccggggactgactgtcagctagcgcgcccactacaagaaattcacaagatagagcgtagaaagccatgacccagcagtatgaaccactgcgcctgcacgtccctgaaccctcgggccgcccaggctgcaagaccgacttcacctacctgcgcctgaccgacgcaggcaccgtgcgcaaacccgccatcgacgtagaacccgccgacaccgccgacctggccaagggcctgatccgcgtgctcgacgaccagggccaggccctcggcccgtgggctgaaggcatcccggtggagatcctgcgcaaaggcatgcgcgccatgctcaagacgcggatcttcgacaaccgcatggtggtcgcccagcgtcagaaaaaaatgtcgttctacatgcagagccttggcgaagaagccatcggcagcgcccaggccctggccttgaacatcgacgacatgtgcttccccacctaccgccagcaaagcatcctgatggctcgcgaagtgccactggtggacctgatctgccagttgctgtccaacgagcgcgacccgctcaagggccgccagttgccgatcatgtattcggtcaaggacgccggcttcttcaccatatccggcaacctcgccacccaattcgtacaaggcgtgggctggggcatggcctcggcgatcaagggcgataccaagatcgcctccgcctggatcggtgacggcgccaccgccgaatccgacttccacaccgccctcaccttcgcccatgtgtaccgtgcgccagtgatcctcaacgtagtcaacaaccagtgggccatctccaccttccaggcgattgccggtggtgaagcaacgaccttcgccggacgcggcgtcggttgcggcatcgcctctctgcgcgtggacggcaacgacttcatcgcggtgtacgctgcttccgcctgggctgccgagcgtgcgcgccgcaacctcgggcccacgctgatcgagtgggtcacctaccgcgccggtccgcattccacatctgatgatccttccaaataccgccccgccgacgactggagccacttccccctgggcgacccgatcgcccgcctcaagcagcacctgatcaggattggccagtggtccgaagaggagcatgcggcggtcagtgcagaacttgaagccgaagtgattgccgcgcaaaaacaggccgaacagtacggcaccctggccggcggccagattccaagcgccgcgaccatgttcgaggacgtctataaagagatgccggagcacttgaagcgccagcgtcaagagttgggggtctgacatgaacgatcacaacaacagcattgaagtggaaaccgccatgaccaccaccaccatgaccatgatccaggccctgcgctcggccatggatgtgatgctcgaacgagacgacaacgtggtggtgttcggccaggacgtcggctatttcggcggcgtgttccgttgcaccgaaggcttgcagaccaagtacggcagctcgcgggtgtttgacgcgccgatctcggaaagcggcattatcggcgtggccgtgggcatgggcgcctatggcctgcgcccggttgccgaaatccagttcgccgactacgtctaccccgccaccgaccagatcatctcggaagctgcgcgcctgcggtatcgctcggccgggcagttcaccgcaccgctgaccatgcgtatgccctgcggcggtggcatctacggaggccagacccacagccagagcatcgaagcggtgttcacccaggtctgcggcctgcgcacggtgatgccgtccaacccctatgacgccaagggcctgctgatcgcctccatcgaaaacgatgacccggtgatattcctcgagcccaagcgcctgtacaacggcccgttcgacggccaccacgaccgcccggtaacgccgtggtcgaaacacccgcaagcccaggtgccggacggttactacaccgtgccgctggacgtggccgccatcgtgcgtccgggctcggccgtgaccgtgctgacctacggcaccacggtgtatgtgtcgcaagtcgccgccgaggaaaccggtatcgacgccgaagtcatcgacctgcgcagcctgtggccgctggacctggacaccatcgtcaaatcggtgaagaagaccggccgttgcgtggtggtacacgaagccacccgcacctgcggctttggtgccgagctggtgtcgctggtgcaagagcattgcttccaccacctggaagcgccgatcgaacgcgtcaccggatgggacaccccctacccgcacgcgcaggagtgggcgtatttcccagggccgtcccgcgtgggcgcggcgttgcaacgggtcatggaggtctgaatgggcacgcacgttatcaagatgccggacattggcgaaggcatcgcggaagttgaactgtcggtgtggcatgtgaaggtcggcgacatggtcgtcgaagaccaggtgctggcggatgtcatgaccgacaaggcgatggtggacattccctcgccggtgcacggcaaggtgctctccctcggcggcgagccgggtgaagtcatggccgtgggcagtattctgatcagcattgaagtggaaggcgcgggcaacgccaaggatgcgccgctcgtcaaagaggcgccgaaagtcgccccggtggtggaagccaagccggtgccggcggttgtcgagagcaaacccgcgccggttgtcgcggcgcaggcgcctgtggcacgtgccgccgacgaacgcccattggcctcccctgccgtgcgcaagcacgccctggacgccgggattcagctgcgtctggtgcagggctcgggcccggcgggccgaatcctccacgaagacctcgacgcctacttgcaacaaggcacagcgaaggcttcatccaccgccaacccctacgccgaacgcaacaccgaagaacagatccccgtgatcggcatgcgccgcaagatcgcccagcgcatgcaggacgccacccggcgtgccgcgcatttcagctacgtagaagaaatcgacgtcaccgctctcgatgagttgcgcgtgcacttgaatgaaaagcacggtgccacacgcggcaagctgaccctgctgccgttcatcgtgcgcgccatggtcgtggcgttgcgcgacttcccgcagatcaatgcgcgttacgacgacgaagcccaggtcatcacccgcctcggcgcggtgcatgtgggcgtcgccacccagagcgatgtcggcctgatggtgccggtggtgcgccacgccgaggcccgcagcctgtggggcaatgccgaggaaatcgcacgcctggccacggccgcgcgcaatggcaaggccagccgtgatgagctgtcgggttcgacgattaccttgaccagcctgggcgcgttgggcggcattgtcagcacgccggtgctgaacctgccggaagtggcgatcgtcggcgtcaatcgcattgtcgagcggccgatggtgatcaagggccagatcgtggtgcgcaagatgatgaacctctccagctccttcgatcaccgcgtggtcgatggcatggacgcggcgcaattcatccaggccattcgcggcctgctcgaacaacccgccagcctgttcctggagtaaggcatgacgcagacattgaataccaccctgctgattatcggtggcggccctggcggttatgtggcggcgatccgtgccggccaactgggtatcccgaccatcttggtggaaggccaggcgctgggcggtacttgcctgaatatcggctgcattccgtccaaggccctgatccatgtggccgagcagttccagcaaaccgtgcaccacagccagggttcacagctgggcatcgaagtggatgtgccgaccctggacatccgcaaaagcgtggaatggaaagacggcatcgtcgaccgcctgaccaccggcgtcgcggcgctgctgaaaaagcacaaggtgcaggtgatccacggctgggccaaggtggtagacggcaagaccgtcgacgtcggcgaccagcgcatccagtgcgaacacctgctgctggccaccggctcgaaaagcgtcaacctgccgatgctgccgattggcgggccgatcatctcctcgaccgaagcccttgcaccgaaaagcgtgcccaagcgcctgatcgtggtgggcggcggttacatcggtttggaactgggcatcgcttaccgcaagctcggcgccgacgtgagtgtggtcgaagcacaggatcgcatcctgccggcctatgatgccgagctgacgcagccggtgaacgaatctctcaggcaactgggcgtgaagctttacctcaagcacagtgttaccggttttgccgatggcagcctgcaagtgcgcgacccgaacggcgacaccttgtcgttggccactgatcaggtgctggttgccgtcggtcgcaaacccaacacccagggctggaacctcgaagcgctgaacctggatatgaacggcgcggcgatcaagatcgacaaccgctgccagaccagtatgcgcaacgtgtgggccatcggtgacctgagcggcgagccgatgctggcgcaccgggccatggcccagggcgagatggtcgccgaactgatcagcggcaagcaccgcgaattcaacccggcggccatcccggcggtgtgctttaccgacccggaactggtggtggtcggcaagacgcccgacgaagccaaggccgccggcctggactgcatcgtgtcgagcttcccgttcgcggccaatggtcgggccatgaccctggagtcgaaaaccggcttcgtgcgggtggtggcacgccgtgacaaccacctgatcgtcggctggcaagccgtgggggttggcgtctcggaactctccaccgcctttggcctgagcctggaaatgggttcgcgcctggaagacgtcgcgggcaccatccacgcccacccgaccctcggcgaagccgtacaggaagccgcgttgcgggcgttggggcacgcactgcatctgtaaaaccgcggtgaggccatcgggggcaagccccctcccacaggggaatgcattcaaattgtgggagggggcttgcccccgatagcggtggatcggtcaaaccagaggctgaaggcgtccacccagtggctcccacacaagccaagaatgcagtattgttgcgcccatccagaaaaaaaccgacttgaccaacgatagagggtgtcatgggtaacgaaagcatcaattgggacaagctgggttttgactacatcaagaccgacaagcggtttctccaggtctggaaaaacggcgaatggcaagaaggcaccctgaccgacgacaacgtgctgcacatcagcgagggctccaccgccctgcactatggccagcagtgcttcgaaggcctcaaggcctaccgctgcaaggacggttcgatcaacctgttccgcccggaccagaatgccgcccgcatgcagcgcagctgcgcacgcctgctgatgccgcacgtgtcgaccgaagacttcatcgatgcctgcaaacaagtggtcgcggccaacgagcgcttcatcccgccgtacggcagtggcggcgcgctgtacctgcgcccgttcgtgatcggcaccggtgacaacatcggcgtgcgcaccgcgccggagttcatcttctcggtgttctgcatcccggtcggcgcctacttcaagggcggcctggtgccccataacttccagatctccaccttcgaccgcgccgccccacagggcaccggtgccgccaaggtcggtggcaactacgccgccagcctgatgccgggttcggaagcgaagaaatccggtttcgccgacgcgatctacctggacccgatgacccactcgaaaatcgaggaagtcggttcggccaacttcttcgggatcacccacgacaataagttcatcacaccgaagtcgccttcggtgctgccaggcattacccgcctgtcgctgatcgaactggccaagacccgcctgggcctggacgtgatcgagggcgaagtgttcatcgataagctggaccagttcaaggaagccggcgcctgcggtacggcggcggtgatctcgccgatcggcggtatccagtacaacggcaagctgcacgtattccacagcgaaactgaagtcggcccgatcacccagaagctctataaagagctgaccggtgtgcagaccggcgacgttgaagcgccgcaaggctggatcgtcaaggtctgagccacctggaaaaacccgccatctggcgggttttttcattgttcggggatattcaccactagcttcttgcccatgctgatcctgggttccaccccataccccaatgcctcgtagaacccgacgaccccctcattaccactggtgatctgcaggttgatcttcatgcagcccagcgccgtcaatgcctgttccgcatgccgcaccagcgacgaacccaggccatggcgccggtagtccgcatgcaccgccactgaatacagccagccacggtgcccgtcatacccggccagaatcgtcccgatcacggtttttttgtccgtcgcgacgaagaacaaaccatcgttgaccgccagcttcttatcaatcgccagggcgggcaggttgtgcgccgtttcgtagccaaacgcctcttgccacaacgccactacctgcgcccggtgctgacggtcgcgatacggcccgatgggatgccgggacagcagggccttttccatcaccaacgtacgttcgctgccgtgataaacgtcgcgcacggtgtgaaaccccagcttggtgtagaacggctcggcggtcagcgaagacggcacgctcagcaccgtcaccccgtcttcgcgggcgcgtagctcgatttcgatcatcaacagccgaccaatgccctgcccttgcaactccggattgacgaacaccgagcgcaccacattcgcatccagcgctgcggtggcgacgatcacctgatcctgaatcgctaccagcaccacgcggcgcttgagcaacgccagcactgcctccggtgtgaagttgctggcgacccgcgcaatcacctccgtcggataatcccgcgcattgctgctgtgcagggccgcgaggatgacctggctgatcccttcggcatcggcttcctgggcgagacgaacggcggtagacatgattcctcctggctgacacagctgcaacaaacaccatcctaccaatgtgggagggggcttgcccccgatagcatgctttcagatatagattttctggctgacccaccgctgtcgcgggcaagccccctcccacaggttgcatgcatttcactccggcagccgattcggctgccctacccaacttttcagctttcccggctgaaccacccctcggtttcagccgggattcaccccgcacaacccacaaaatagccccacagctcaccccatggatttcgtgcccccatgcaaaccaccaacaccgtcttgatgattcgcccggcgcgctttgccttcaacccggacaccgcaatcaacaaccgtttccaacgccagcctctcgacccactccacgcacagcagaaagcgctggaagagttcgacggctatgtcgccaccctgcgcaatcacggcgtcgaagtgctggtggtgcaggacaccccggcgccccacacccctgactcgatcttccccaacaactggtggagcagccacgccgacggcagcctggtgctgtacccgatggaaggccagaaccgacgactggaacgcgacaaaggcgtgctgcaagtactggagcaacgttttgcgatcaacagcaccatcgacctcagccacctcgaacaacagaacatcttcctcgaaggcaccggcagcatggtgctcgaccgccagcaccgcatcagctacgcctgccactccgggcgcacccaccacgacgccctgcgtcagttcgccgagcgcctcgactaccagctttgcgtgttccacgcggtcgaccgccaccacgcgccgatctaccacagcaacgtgatgatgagcgtcggccgcaacctctcggtggtgtgcctgcaagccctgccgattgccaatgagcgccaggccctggagcgctccctgcgcgacaccggtaaggacatcgtcgccctcgacttcgaccagttggaagccttcgccggcaacatgctcgaagtccacgaccgcgacggccagccgctgctggtgatgtcggccagcgcctggggcgctctgcaaccggcgcagcgccaacatatcgagcgccacacccggccggtggtggtgaacatcgacaacatcgaacgcatcggcggcggcagtgcccgctgcatgctggcggaagtgcatctgcccgcccgtccctcatttcaataaggagtcttgccatgacccgctatatcgacgtcaacgacctctgctacctggtctcgcaaaaaggcctgtccacctgcatcaccgaaatggccgagtacatccgcgccgactacctgcgctggcaagatttcgaaaaatgcgcgcgcctggccaaccactcgccggacggcgtgatcgagctgatgccggtgtccgatgcgtcgctgtatgcgttcaagtacgtcaacggccacccgaaaaacaccctggcaggcatgctcaccgtaatggccttcggcgcgctgggcgatgtcgacaccggcctgccggtgctgctggcggaaatgaccctgaccaccgcgatccgtaccgccgccacctcggcgctggtcgcccgctacctggcccgcgagaacagccgcagcatggcgctgatcggcaacggttcgcagagcgaattccaggccctggccttccacgccatgcttggcatcaatgaaatccgcctgttcgatatcgacgccaaggccactgccaaactggccgccaacctcaaggccttcccggcgatcaaagtgatcctggccggcagcgtggctgaagcggtcaaaggcgccgacatcgtcaccaccgtcaccgccgacaaggcctacgcgacgatcctcaccgacgacatgatcgaacccggcatgcacctcaatgccgtcggcggtgactgcccaggcaagaccgagctggaccgacgtatcgtcgagcgcgcccgggtgatcgtcgagtacgaaccacaaagccgcatcgaaggcgaaatccagcacatgccggaagattcgccggtcacagagctgtggcaagtgatcaacggccagcagccaggccgcgagaatgcgcgccaggtcacgctgttcgactcggtgggttttgccattgaagactactcggccctgcgctacgtactcgacgtcgccaaggcgctggatgtgggcagcacacttgaactggtgccggacctagccgaccccaaagacctgttcgcacgcctggcccaacagccccgcgtacagcagaaaaagcgcgcctgagaccgctctggcctgctgctttgcgtcgagggcgggccattttttcagggaggaaaagccgattcagcgggtgtcacagccgattccgctgcattgccagttttaacagcgcaatttgcgctttatgcgaggggtaaacgacacaaaaaacgcaccatcatgaagcattctctgctcccagttattcactgccctgacatcaattacaaaatatagggacctgcacatgactccattgcgatcactcttcgccgcgctgctgttgccactctgcgccacctccgcccacgcccaggactggaaagaaatccgtttcggcgtgttccccgaatacccgcccttcgaatccgtggccgccgacggcagcctgcaaggtttcgatatcgagctgggcaacgcgatctgcgccaagctcgaagtgaaatgcacctgggtccacaatgaattcgacggcatgatcccggccctgcgcgcgcgcaagttcgacgcgatcatgtcgtccatggccgtcaccccggcccgtgaaaaaatcatcgacttcagtgaccggctgttcctcagcccgacctcggtgatcacccgcaagagcgccgacttcggcgacaccccggaatccctcaagggcaagcaagtcggcgtactgcaagggtcgttgcaggaggcctatgcccgtgcgcacctggccaagctcggcgcgcagatcaaggcgtaccagtcccaggaccagaactacgccgacctgcagaacggccgcctcgacgcgaccctgaccgacaagctcgaagcccagctcaacttcctgtccaagcccgaaggcgccgacttcaagaccggcccggccttcaaggacccgaccctgcccctggacatcgccatgggcctgcgcaagaacgaccaggaattgcgcgcgctgatcaacaagggcatcgctgcggtgcaggcggatggcacttacgcgcagatccagaagaaatactttggtgatcaggacatctaccacgagtgatgctctgacctcgctgtggaaacttgcttgtgtgggagggggcttgcccccgatagcggtggttcagtcaactgatttggcactgatacacctctatcgggggcaagccccctcccacaaaaggcagcgtccacagtcaatctctgtgctccatcgagatcatttccatgaatgaattcctcaacttgcaaggctacggcccgatgctcgcccagggtgcgtggatgacgctcaagctgtccttcctcgccctggccttgagcctcgccctcggcctgatcgccgccggcgccaagctctccagcgccaaatggctgcgggtgccggccacgctctacaccacgctgatccgcagcgtgccggacctggtgctgatcctgctgattttctacagcctgcaactgtggctcaacgacctgagcgaactgttcggctgggactactttgaaatcgacccgtttaccgcaggcgtcgtcacgctgggcttcatctacggtgcgtatttcaccgagaacttccggggcgcgatcctcagcgtgccggtcggccaactggaagcggcgaccgcctatgggcttagccgctggcagcgctttcacctggtgctgttcccgcagctgatgcgttttgccctgccgggcctgggcaataactggctggtgctgctcaagtccacggcgctagtgtcgatcatcggcctgtcggacctggtcaaggccgcgcagaacgccggcaagaccaccaacgagccgctgtacttcctgatcctcgcgggcctggtgtacctgatgatcaccaccctctccaaccgcatcttcaagcgcctcgaacggcgctacaacctcggcatcaaggggatggcgcgatgatcgaactgttccagcaatacggcctggcctacctgctcagcgatggcgcggggctgtccggcgtggccatgaccctgtggctgttcatcgtctcggtggtgttcggcttcgtgctgtcgattccgctggcgctggcgcgggtttccgagcacttctggctgcgctggccggtggaggtctacacctacctgttccgtgggacgccgctgtatatccagttgctgatctgctacaccgggctgtacagcctggaagtggtacaggacaacgccctgctcaaccagtttttccgcaacgcgctgaactgcaccctgctggccttcgtgctcaacacctgcgcctacaccgtggaaatcttcgccggggcgatccgcaatattccccacggcgaaatcgaagcggcccgcgcctatggcctgcatggctggcggttgaacctgtttgtggtagtgccggcagctctgcgtcgcgcattaccggcctacagcaatgaaatgatcctgatgctgcacgccacctccctggcgtttaccgctaccgtcgccgacatcctcaaggtggcccgcgacgccaatgccgagacgttcctgacgttccaggccttcggcatcgccgccctgctctacatgctgctgtcctttgcactggtgggcctgttccgactggccgaacgtcgctggatgcgttttcttgttcctacccgaggctaacccatgaatcagtccgcgcaggccctggccacttatcccgttgacgaacccgtagccaaacccgccaccgctgccatcaagctgcaagtcgaaggcatccacaaacgctacggcgaacacgaagtgctcaagggcgtatcgctgaatgcgcgcaatggcgatgtgatcagcctcattggcgccagcggctccggcaaaagcacgatgctgcgctgcatcaacttcctcgaacagccagacgccggggtgatcaccctggatggcatcagcctcgaaatgcagccaggccgcgccggcacccgcgcgccgcaccaggcccagttgcagaacctgcgcacacgcctggccatggtgttccagcacttcaacctgtggagccacatgaccgtgctggaaaacatcaccatggccccgcgacgggtgctgaacgtgagcgccgccgaggcggaaaaacgcgcgcgcctgtacctggacaaggtcggcctgccgggccgcgtggcggatcagtacccggcgttcctgtccggcggccagcagcagcgcgtggccatcgcccgagccttggcgatggaaccggagatcatcctgttcgatgaaccgacttccgcactcgacccagaacttgtaggagaagtcctcaaagtcatacagacgttggccgaggaaggtcgtaccatgctgatggtcacccacgaaatgggctttgcccgccaggtgtccagccaagtgctgttcttgcatcagggcaaggttgaggaacaaggcgatgccaggatcctcgaccaccccggcagtgagcgcctgcaacaatttctttccaaccgtttgaagtgaaccccatggataccaaggccaacggaccccattcctcccctgcgctggaccgcatcgatgaggccatcatcgaagtgctgcgccatcaggggcgcatcacctacgaaaaactctcgtcgctggtgcacctcacgcccaggccttgcctggaacgggtgcgcaagctggagcggcgtggggtgatccgtgggtatggggcgatcatcgatgtgcagatggtctcgccaggcttgtcattgctggtcctggtggccttgtccaaccaaagcgggcgctcggcgcaaaaggccttcgaagcctgtgtgaaagcctgcccgcaggtgttcgaatgccagctgatcagcgggccgttcgactacagcctgcgcatgcgttgccgggacatggagcactatcgagtgctgacagaaacctggttgaacaatgacgagctgcacatcgataagttggtggcgcatccggagttggcggtggtcaagaacaccgccaccgagctggcctgaacttatcgctccaaaacaccgcaaatctaatgtgggaggggcggtgcgacgattcgacttgcccccgatgagggagtgtcagttaaaaatgtatagactgacacactgctatcgggggcaagccccctcccacatattcaaccctgcccgcttaagatttttttgccaggcttggtgccgatcagcctggcctgcccatccttctgcttccccgtccgcgcctcgctgatcaaccccggtatcaacttgccctccggcaggttcttccagaaccggctgggcaagtgcccttccatcaccttggggttcaaccgcgccgggttgaagatgtggctgtaataggtcagccacatcgcattgtgggggtcctcgacattctgcgccaactgccgccacgcctcggggcattcacgctggtggatcaactgctcgccgtcgtagtagaccccatccagcggcgtggcgatcatccagcgatggcggcccatgcgcccgataaagtgctggctggctgatttcaggatgtcatgggctggctcgtgccaggccacgtattccggcagttccggccccgctcccgccggcagcgcgataaaccgcacaaacgcatgcaggtggtgcgcctcgcggctgacctgcttgatccgccgctgcaactcactgcccagcttgtccccggccagcatcgcggtgcggtcgccatggctgacgcgccataacacttcgtacaacaagctccaacgctggtcgccgtgatagcaggcagccgactccagcagttccaacaacgctttggggatccgcgcctggaacggccccaggccctcagggatcggctcatcggtggcaaacaggtccgccacctccgcctcgccccagctcacctggctggggtcgacctgatggctgagcagccagcgcgcctgatcgcgccaggtggcgaacaggttgtcgcattccaggctgatcacccccacaaccccatctgctgcggttgcgggcgatcacgcagttgttcgcgcagcaatacgctggtgctgtcggcctgttgcgggtggtagtcgctggtgatgaaaaacggcttggccttggccagtacgcagcgcatgcgcgccaggtcttcgaagcggatcttgcgttcgcggcgcaggtccaccaggcgctgggtggtgcgcaggccaatgcctggaatgcgtgcaatcaaggtcggttcggcgcggttcaggtccagggggaacacgtcgcgattgtccagggcccaggccagcttggggtcgatgtccagggccaggtggccagggcctttgaacagttcattggcattgaacccatagctgcgcaacaggaagtcggcctggtacaagcggtgctcgcgcatcagcggcggcgcggccagcggcacgcttttcgggctgttgggaatggggctgaacgccgagtaatacacgcgacgcagcttgaagttgccgtacaacgcctcggcaccgtggaggatggtgctgtcatctgtgtcgtcggcgccgacgatcagttgcgtgctctgcccggccggcgcaaaacgcggtgcacgcggttcgttgcgcacggtctgctcgccggtgtagatggtctgcatggcctgcttgatcgagacgatctttttttccggcgccagggtctgcaagctggcctcggtgggcagttcgatgttcacgctcagccggtcggcatagcgcccggcctcggcgatcagcgccgggtccgcgtcgggaatggtcttgaggtggatatagccgcgaaagtcgtgctcttcgcgcagcagcttggccacgcgcaccaactgctccatggtgtagtcggacgaacggatgatgccggagctgagaaacagcccgctgacgcaattgcgccggtagaaatccagggtcagagtgaccacctcctccgggctgaaacgcgcacggggcacgtcgctggagcggcggttgacgcagtactggcagtcgtagagacagaagttggtgagcagcaccttgagcaacgacacgcaacgcccgtcgggcgtgtagctgtggcagatgcccatgccatcggtggaacccagccccgccttgccctcggagctgcgcttgggcgcgccactgctggcgcacgatgcatcgtacttggcggcgtcggcgagaatgctgagtttttcgatcaactgcatggagggctaccgatactggttttttgtacagtatcagccaaccctccgggtcacaagtgcagcctgtcagcttgccgtggcgagcaacaggtcctgcaccgagcgccccttgccgcgcccacggtccagggcatacaacgacgctgcaatctcatcggcgcgaatcggcagcaccgacagcaaggtgtcgctcaagccatggctggcctggctgaaaccctggatgtagatgccggcgttgcagcgctcgtcggtgacgatgcggtagtcgcgtgccacttcgaagtcgcccaggtagtcttccaacggcgccagcaaggcgcggtgtgtctggcgctcgtagccggtggccaggatcaccgcgtcgtaatggttgacgctggtgtcgccgttggcgttgttgcgcagcgccagttcgatacccagcgggccgggggtggccttctcgaccacggtcatggtgcggaacgcctggcgggcgatgccggagactttctggcggtagaaaatgccgtagatgcgctcgatcaggtcgaggtccaccaccgaatagttggtgttctggtactcggccaccaggcgctcacgctcggcgccctcctgctggaacaccaggtcggtgaaggccggcgagaacacttcgttgacgaacgggctgtcatcggcgggcttgagcgccgagccgcgcaggatcatgtcgacctgcaccgacgggaagctgtcgttcaggtcgataaaggcttcggccgcactctggccgccgccgatgatggcgatgcgcatggccttgccgtcgacacacggctgggtggccatgcgctccaggtattgcgaatggtggaacacccggctgtcgcctttaagcgccttgaacgcctcgggaatacgtggcgtgccaccggcgctgaccaccaccgaacgggtggtgcgcacatgctgctcgcccagggcatcgcgggagatcacgcgcagcgcttcgacctgctgctgatgcaggatcggctcgatggccagcacctcctcgccgtagcgcgcctgggcctggaactgcccggcgacccagcgcaggtagtcgttgtactccatgcggcacgggtagaaggtgcccaggttgataaagtccaccaggcggtcgtgggctttcaggtagttgacgaaggagtacgggctggtggggttgcgcagggtcaccaggtccttgaggaacgagatctgcagctcgctctgggttaccagggtattgccgtgccagcggtagtcggcctgtttgtccaagaacagcacgtccagtttgccctgggccttttcgcgctcctgcagggcgatggccagcgccaggttcgaagggccgaaaccgataccgatcaggtcgtgaaccgcgggcgaagcaattgcctgtgtcattccagtgtcctctggataagccccttggcggtggggcgggaatacctttcaaggcctgaacaacaggccgtgtgttgataggaaacgaggacagtgaaataaaatttaaccgatcattgatcagtgtgcttcccactcgcgcatccgtacccggcagtgcttcatggcgttgacgatgtgtttttccaccagggcgcgggaaatgcacaggcgttcggcaatctgcaagtgggtcaggccgtcgagcttacgcagcaggaagctgtcgcggcaggccggcggcagttcggccagggcgcgttcaagcagctccaggcgctggccgtgggcgtgggtggtgtgcggcgaactgctggcaaagcgttcttcggcatcgagtacgtccagcggttcgacctggcgcaaggcgttgcgccgatggccgtcaatcaccaggttgagcgcagtacggtacaaaaaggcacggggttgctcgatgggggtgtcgctggaacgttccagcacccggacatacgcgtcatgcaccacatcctcggcgacctgacggttgcccagcttggcgttgaggaaacacaccagctcgcgatagtagttttccaacatgactcccggccgcggggtagcggcattaggtccccgggtgcaaaaaagacagcgttaaggtaatggcagtttgagtgcgtgcaatttatagtaattctcatctacttttaaagcagacttgcatcaacggacgatttttttcttcaagggagctgtaactgcttatgtaaccgcctaaatccccgcgcaattctctcgtttacttgtcagctccccgcaactgcggtccgaactttcctggctggaaacccacgcatgaaacgccctcgacctgcccgacgcgccttgctcgttatcgcgtgcctgatccccatcatcgccgtcgcggcctggcaggtgctgccgccggggcgtgacaccctcaccaccgtcaccgtcacccgcggcaatatcgaaaacagtgtgaccgccctgggcaccctgcaaccgcgccgttatgtggacgtgggcgcccaggcatccggccagatccgcaagatccacgtcgaggccggcgaccaggtgcaggaaggccagttgctggtggagatcgacccgtccacgcagaaggccaagctcgacgccagccgctacgccatcgagaacctcaaggcccagttgcaggagcaaaaggcccagcacgaactggcgcgccagaaataccagcgccagcagcgcctggtcgccggcaacgccacccgcgaggaagacgtgcaaaccgccaaggcggaactgagcgccacccaggcgcgggtcgacatgttccaggcgcagatcctgcaagcccaggccagcctgcgcagtgatgaagccgagctcggctacacgcggatttatgcgccgatgaccggcaccgtggtcgcggtggacgcccgcgtcggccagaccctcaacgcccagcagcagacgccgttgatcctgcggatcgccaaattgtcgccgatgaccgtgtgggcggaagtctcggaagccgatatcggccacgtcaaaccgggcatgaccgcctacttcaccaccctgagcggcggtaaccggcgctggaccagcaccgtgcggcagatcctgccgatcccgcccaagcctctgaatcagactcaaggcagcggcagccccaacagcacgaataaaagcggcagcggccgcgtggtgctgtacaccgtgttgctggatgtggacaacggcgacaacgcgttgatggccgaaatgaccacccaggtatttttcgtcgccagccaggccaaggacacgctgacggcaccggtcgctgcgctgcagggcacgacgaacgccaaccagcagatcgcccgggtggtggccaagaatggccgcatcgaacagcgccaggtgcaggtcggcatcagcgaccgcctgcgcgtgcaagtgctcgacggcctgaacgaaggtgatcacctgctggtcggcccggccgacggcaacgggggttgaggtgaacacgcccctgatcgaactcaaggacatccgcaagtcctacggcggcggcgacagcccgcaggtcgacgtattgcgcggcatcgacctggcgatccatgccggggaattcgtcgccatcgtcggcgcttccggctccggcaagtccacgttgatgaacatcctcggttgcctcgaccgccccagcaccggcgactacctgttcgccggggaaaacgtcgcgcacctggacagcgacgaactcgcctggctgcgccgtgaagcctttggctttgtgttccagggctaccacctgatcccctcgggttcggcccaggaaaacgtcgagatgccggcgatctacgccggcatcagcgccgccgagcgccatgcccgcgccaacgccctgctcacccgcttgggcctggccgagcgcaccggcaaccgtccgcaccagctttccggcggccagcagcaacgggtgtccatcgcccgtgcgttgatgaacggcggccatatcatcctcgccgacgaacccaccggcgccctcgacagtcatagcggcgccgaggtcatgaccctgctcgacgaactcgccagccagggccacgtggtgatcctgatcacccacgaccgcgaagtggcggcgcgggccaaccgcatcatcgagattcgcgatggcctgatcatcagcgactcggccaatgacagcgacgcgaaacccgtggccaccagcggcgccctgcaagccgtggacctgcgccagcgcctggccgacggcgccgagcacaacggcgcctggaaagccgaactgatggacgcggtacaggccgcctggcgtgtgatgtggatcaaccgcttccgcaccgcgctgaccctgctgggcatcatcatcggcgtggcgtcggtggtggtgatgctggcagtgggcgaaggcagcaagcgccaggtcatggcgcagatgggcgcgttcggctccaacatcatctacctcagcggttcgtcgccgaatccgcgcacgccgctgggcatcgtgaccctcgatgacgtgcatgcactggcgtccctgccgcaggtgcagcgcatcatgccggtcaatggcaacgaagccggggtgcgttttggcaatgtcgactacatggcctacgtgggcggcaatgacaccaacttcccggagattttcaattggccggtggtcgagggcaattacttcactgctgccgacgaacgtgcggctgccaccgtggcggtgattggacatcgcgtgcgcgagaagctgttcaagggtgaggtcgaccccatcggccagtacatcctgattgaaaatgtgccgttccaggtgattggcgtgctggcggaaaaaggcgccagctccggcaacaaggacagtgacgaccgggttgccatcccttacaccgccgccagcgtgcgtctgttcggcagctacgaccccgagtatgtggtgatcgcggcggcggatgcgcgcaaggtccgcgaggccgaagtggccatcgaccagttgatgcaaaagctgcacaacggcaagcgcgactatgagctgaccaacaacgccgcgatgatccaggccgaggcgcgcacgcagaacaccctgtcgctgatgctcggttcgattgccgcgatttccctgttggtgggcggcatcggcgtgatgaacatcatgttgatgacggtgcgcgaacgtacccgtgaaatcggtatccgcatggccacaggcgcacgccagcgcgacatcctgcgccagttcctcaccgaagcggtgatgctttcggtggttggcggcctgtgcggcatcgccctcgcactgttggtcggcggtgtgctggtgctggccaaggtggcggtgcagttttccctggtggcggtgttcggtgcattcggttgcgccctcgtcaccggcgtcgtattcggcttcatgccggcccgtaaagctgcccggctcgatccggttaaggcgttgaccagtgaataaacgatccctttacctgcccggcctctgcgtattgctcagcgcctgcaccggcaacccgccagccctggacagcggcatcgcaccgccggccgcctggcaatataccgagcgtgcggcggcgcaggccaccaaccggcaatggtggacacagttcggcagcccgcaactcgaccgcctggtcgatcaggctcgccgcgacagctacgacgtagctgccgccaccgcgcgcgtgcgtcaggcccaggccagtgcagtgatcgccggcgcaccgctgttgccggaggtgaagttcaacctcgccaccagccgtcaaaagttgctgcgcggaccgggcgggcccgatctggatgcgtcacgcaccaatgatgccgtcgacaactttggcgccaacctcaccgccagctacgaagtggacttctggggtggccgtgccgccgcccgtgacagtgcgctgcatagcctgcgcgccagcgagtttgaccaggccacggtggagctgaccttgctcagcagcgtggccgaccgttacgcgcaaaccctggctgcccaccagcgccagcagatcgccgaactcaacctggcgaacgcgcgcaacgtactcgacctggtgcagacccgctatgacgccggctccgccactgccctggaactggcccagcaaaaaagcctggtcgccagccagcaacgtcaactgccgcttatccagcaactggccgaagaatcgcgcatcaccctggccgccctcctcggccagcccgtgcaggccctggagctgggcagcgaaccgttccaggccctcacctggccgaccatcggcgccggcatgcccagccagttgctcagccgtagacccgacatcgccaaggccgaggcgcaactggcggcggcgcaagccgacgtcaccgtggcgcgcgcggccatgctaccagccgtcacccttggtgcgacgcttggctccgacgcttacaaggccgcagacattctgcgcagcccctactacacgctgaccgccggcctggtcggcccgatcttcaacaacggccgtttaagcgctgaacgcgacaaggcccgcgcccgtcaggatgaactgctgcaaacctatcgcggcgcgatcatcaacggctttgccgatgtggaaaaagccctcagcagcatcacccgcctcgaccagcagcgccaatggcagcgtgaagaactgcaacaggcgcagacggcgttccagatcgccgaaagccgctaccaggccggcgccgaagacctgctcaccgtgctggaaacccagcgcacgctgtacgcggcccaggaccagaatgtgcaactgcgcttgtcacgcctacaggccagtatcgccctgtacaaagcgctgggtggtggctggcagacagagatccgataaacaaaactccagtttcatacacaagacgttctttcagcctacattcttcgacccaaggtccttggtaaaaaaaccgctatcacacggttgcccgggacctctcgatgactgctgcaaaacacctgacgtgcgcctgtctctggctgctggcaaaccttgccgcagcccagccgttgatcccccccactgccatcgactggttgctggactgtcccctgcccaccgttgaacgcctggaccccgcggtactggaacgtacccaatgcggcaccgtgagcgtaccgcgcaattacgcagcgccccgccagggcaggctgcgcctgtacgtgactcgcgtcggtgcccgcgacccgctgagccgtgaaggcgtgatcattgcccaggccggcgacgcggccaaaaagaatcaggtcggcacctttgtcatccacctggccagcctgtggaacgcccactcccacccggcctatcgcaggctggtggaccgttatgacgtcatcgagctcagcacccgcgacctgagtaccgacaatggcatcgaaatggccgcccaggacctggagttcgtacgtacccaactcggtgaagctcagttgcgttacctgggcaatgccgacagcgcacgcctgggcaaccgctacgccacgctgttccccgagcgggtcacgcgcatggtgctggtcaacgcgcacgcgagcgaaatggcggcgcccttcgtcgaacaattgcgcctgaacgactcggccacacaggacgccagccgttgcatcaaccgctgggtgggcgacttcctggtctacggcaagcaacctccacgctccacgcgctgcctggattccgccgacaggcagtaaccccccgtttgcgacctgttggcctcaaaaacgacacccggcgttgacgctggggggcgatcgttattaagtgctatttatccgcattaatacgataaatcgaacccatgctaagccgcccgctacgacgcaaacgccagaagctgtccgatgtgattgtcgagtcggtcaagcgctccatcgtcaccgacgccttgaagcccggcgaccgcctgcccaccgagcgtgagctgatggaaagcttccagtgctccaagggctctgcccgcgaagcactcaaggccctggaagtggaaggcctggtgagcacccgcaccggccccagcggtggcgcctacctgaaccaggccggcaccgaaccggccagccgtgcactgcgcaactacctgcacttccagcacctggacggcgagcaggtgtaccaactgcgcaaagtcatcgaagtggaactggcggtgtcggtgctggggcgcctcagcgaagacgattatcaagccctgcaagacaacgtggatttctgcagcgccccggaagacagcgaagccggccagcgcgagcaacgcctggcggaactggagttccataacctgctggccaaggcctgccccaacccgctgctgagtttcatggcgcagtttctcaacgacctgctgcgcgacctggtggtgctgaaaaaagcctacaagcccaagcgcaagcagttcgacgcggccaacctggattatcacaagcagttgctgatcgcctttcgtgccggggatgaacgtgcggtacgcagcttgatgcatgaacacatgtgcgatgccgaacaccacatgaccgcccttgaaggccaggtcagcccgcattttctactggagttcgatcactcttaaggaacaccacagaccccatgtgggagggggcttgcccccgatgacgccagcacactcaatattcatgtcgactgacacaccgccatcggaggcaagccacctcccacagttgggctgcatttcaaccacacaccgtttcatccaataacaggcctgcccacaggcccttgctccaccgtatcgccattgccactcctgccaataactaaaccagggagtcaccccatgcagcgtcgtacgttgttgaaagccagtctcaccgcagccgccgccctcagcctcccgctgagcgtgcgttcggcatttgccgccgagccctttaccttttacggcctcaagtccatgtctggcgcgtttgccagctatggcaagtttgccgacatgggttcgcgcctggcggtggaacagcaccccgaggtgctcggtcgcccgttgaactacaaagtcatcgacaccgaaggcaacgccggcaaggcggtgcgcaaggtccaggaagccatccagcaggatggcgcgctgttcttccaggggtgcaccttgtcgtcgtcggcactggcggtggccaaggaagtcgacaaggtcggtggcgtgttcatgaccccggtgggcgccgatgaagtcaccggcaaggactgcaacaaggcgacgttccgctggtcggtgcccacctacggcgcgatccgcgaaaccctggtgccgttgatcaaactgctgcccgaagccaagcgctggtacaccatcaccccgcaatacgtgttcggcgaagccctgcttgaaggcgccaaaaacgtgctcaaggaacacggcctggagcatgtcggcaacagctaccactcgctgcaggagcaggaattttccggctacctgaccaacgcgatctcgaccaaacccgacgtgctggtgctgctcaacttcggcagccagtcgtccaacaccctgcgccaggcggtgaatttcggcatcaaggagcgcatgaaagtgctactggtgtggtccgccggcctcgaccagttccaggaattgggcagcgacgtgctggaaggcgtgtacctcggcgcgcagtactggcaccaggtcgacaccccgctcaaccgtgaactggtcaagctcacccaggccaagtacggcatcaaccccacctacccgctggccgccgattacatcagcaccaaggtcatgctcgaaaccatcattgccaccggcagcttcgacgggccgaccgtggccaaggccatgcagggcctgagtttcgaagggccgaccggcaaggaatcgatccgcgccggtgaccaccaggtgatcaaggattactacctgctgatcggcaaggccagcaacgacatggccgacaaggatgacctggccaaagtgctcagcgccggccagtcgttcccgccggtggacgccacgggctgcacgctcggctgatccgctgaattttgtagcgcaaggccgcgcaagcggcgtcctgccgagggttcctgcatgcttaatctttacctgttccagatcctcaacggccttgggctggggatgatctacttcctcattgcggtcgggctgacgatcattttcggcctgctcaatttcgtcaacttcgcccacggcgcgttctttctgctgggtgcctacatctgctacaccgccgtgagcctcaccggcaacttctggctggcgctgctgatcgcgccactggtggtggctgcgttggcctgggtgatcgagcgcctgttgatccagcgcatctaccacttgccgcacatgttccagatcctggtgaccctgggcatcgcgctgatcatccaggaggccagcgtgatgatctggggcccggtgggcaagagcgtcgcggtgccggaactgctgcgcggcgtgctggtggtgggtgatttcgtctacccctactaccgcctgttcctcattgtgttttccgggctggtcggcctgggcctgtggctgctgctggaacgcacgcgcttcggcgccctggtgcgcgccggcagtgaaagcaccgaaaccgtgtcgctgctgggcaccaatattttccgcctgttctccatgaccttcgccctcggcgtggccctggccggcgtcgccggtgtgctgtttgcaccgttgcgcggcgcgcagccctttgtcggcccggagattctcggcgtggccttcgtggtggtggtgatcggcggcatgggctcgttcagcggtgcgctggtcggcggtttgctggtgggcgtagtgcaaagcctgatgaccacactctggccccagggtgcgagcctgatgatctacggcgcgatggccgtggtgattctggtgcgcccttacggcctgttcgggagagcctgacatgagcgagaaaaatcccctgccgtttgccaagacgcaatcgcgcgccatgttgctgtgggtgctggcggtactgatcggcctgccgttgatattgccctcagcaaccctggccaccgagatcctgatctttgccatggccgccctggcctgcaacctgttgctgggctacaccgggctgctgtcgtttggccaaggcattttcttcggcgccggcgcgtattgcgcggcgctgctgatgatccacctgcaactgggcctgttcactgcgttgctcggcgccgccatcgccggtggcttgctggccttgctggtgggcgccctggcgatccgccgtaccggcatctacttcgtgatgctgaccctggccttcagccagatggcgtattttgtcgcctacaccctcagcgactggaccggcggcgacaacggcctgctcagcgtgccgcgcccggaaatccgcctgggcgacaccgtgctgttgtccctggccgacgcccgcgcgttctacggttttgtcgcggtactgttcctgctgatcttcatcggtgcgcgccgggtgatcgcctcgccgttcggcagcacgctgatggcgatccgcgaaaacgaaacccgtgcctcggccatcggctacgacacgcggcacttcaagatcctggtgtttgtgctgtccggcgccgtcaccgggattgccggggcgctgtacgccatgctgctgcactttgtgccgctgtcgaacatcgacctggcgatgtccgagaacatcctgatcatgaccatcgtcggcggcaccggttcgctgttcggctcgctgctgggcgccggttccatcgtgctgctcggggattttctctccgacctgtggccgcgctggctgatgctgctgggggtgatcctgatcctggtggtgatcttcatgcgcggtggcttgtggggcggcctggcgtcgctgttcgagaaggtgcgcggcagccgcaagagcgtggttgtcgccaaggaggaagggctatgagcatcctgctggaaacccaggacctggaactggcctatggtgcgttccatgcggtgaatggcgtcaacctcaaggtcgaggccggcaccatccacaccatcatcggccccaacggcgccggcaagaccagcctgttccactgcctcaccggcgagcgccaggccaccgccggggcgatccatttcgacggccggaacctgatgcgcaaacccgcccacggccgtgtcggcctgggcatggcgcgctcgttccagctcaccagcctgttccagaacctcagcgtgcgcgagaacctgcgcctggccgcccaaggccgtgacggcgcacgcgccctcaacttctggcgccgcgtagacagccagcgcgaacacctggaaatggccgaccaggtgctggagcgcctgcaactcaccgcccgcgccgacaccctggccggcgagttgtcccacggccagcaacgggtgctggaggtgggcatgtcgatctgctccaagcccaaactattgatgctcgacgaacccacctcgggcatgggcatcgatgacatcccgatcatgacccaactgatcagcgaccttggccgcgaccacacggtgctgttgatcgaacacaacatgagcattgtcatgtccatcagccaacgcatcacggtgatgagccacggccagatcctggtggagggcacgccggaattcgtgcgcgccgatgaacgtgtgcgcaccgcgtaccttggggaggctgcctgatgctgatcgtcgagaatatccattcgtactacgacaagagccacgtactggaaggcgtgtcgctcaccgtcaaccccggcgaactggtgacactgctggggcgcaatggcgccggcaagaccaccaccctgcgcagtatcctcggcatcatctgcccgcgccaaggccagatccacttcaacggccaggcgctggtcgggcagaagatcttcgaaatcgcccgccagggtttggcattggtgccggagaaccgcgggattttccgcttgctcaccgtcgaggaaaacctgcgcatcgccgcccgcaagaccagccgctggcagcttgaagacgtctacgccatgttcccgcgcctcaaggagcggcgcaaaaacgccggccacgcgctgtctggcggcgagcaacagatgctcgccatcgcccgcgcgctgctcaacgaccccaagctgctgatcctcgatgaacccaccgagggcttggccccggtgatcgtcgacgaactggtgaagatcctgcgcaaggtcaaggacgacggcctgccggtgctgctggtggaacagaacctgatggtctgcgacaagctcgccgaccgccattacgtgctcgaacaaggccgcgtggtctacgaaggcagcgccgaagccttccgtgccgaccctacgatcaaaaaccgttatttggccctgagtgcctgaccggagactgctaatgaacagttttacgcaaccgctccagagcaacgccccgctgatcaaccgcgaccgcctgtggcaatcgctgatggatttggcccaactgggcgccacggtaaaaggcggcgtgtgccgcctggccctcaccgacctcgaccgccaggcccgcgacctgtttgtgcaatggtgcgaggcggccgggtgcagcgtcagcgttgacgccatcggcaatatctttgcgcgccgtgccgggcgcaaccctgccctgcctccggtgatgaccggcagccatatcgacacccaacccaccggcggcaagttcgacgggtgctacggggtgatggccgggctggaagtgatccgcaccctgaatgatttaaagattgaaacccaagcaccgcttgaagtggtggtgtggaccaacgaagaaggctcgcgctttccaccgtgcatgatgggctccggggtgtttgccggtaagttcgacttgcaggacacactcgacaaagtcgatgaccagggcctgtcggtgggcgccgaattgcagcgcatcggttacgccggctcccgcgccgtgctcggccacccggtgggcgcgtatttcgaggcgcatatcgaacagggcccggtgctcgaggaccaggccaccacgattggcgtggtcatggggtgcctgggccagaagtggttcgacctgaccttcaccggcgtcgaagcccacgccggcccgacgccgatgcacctgcgcaaggacgccctggtcggcgccgccgaggtggtcagcgcggtcaaccgcatcgcccatcaacagcagccccacgcctgcggcacggtgggttgcctgagcctgcacccaggctcgcgcaacgtgattcccggccaggtgcacatgaccatcgacctgcgccacctgcacgcggacacgctgcaagccatggtcgatgaagtgcgcggcgtgatcgaagccaccgcccagcgacacggcctgacctttgaactgacgcccaccgccgatttcccaccgctggacttcgccccgacctgcgtcaacgcggtgcgtgacggtgccgaggccctgggcttgagccatatggacatcgtcagtggtgccgggcacgacgcgatcttcgtcgccgaactcggcccggccgggatgatctttgtgccgtgcgaaggcggcatcagccataacgaaattgaaaacgccgcgccggacgacctggcggcgggctgcgcggtattgctgcgcgccatggtcaatgcggcacagggggaaacggcatgagtgagatcggccaactgacggcggtgcaactgctgcagcattttcgcgacaagaccttgtcgccggtggaggttaccgaagacgccttgctgcgtatcgaacgctacaacccggtggtgaacgcctattgccacgtcgacccggaaggcgcgctgagtgcggcgcgcgcctcggaacaacgttggctcgacggccgaccctgcggtgcgttggacggtgtgccggcgtcgatcaaagacctgacgctgacgatcggcatgccgacccgcaagggctcgcgcacctcatccgccgaagggccgtgggacgtcgacgcgcccttcacagcctttatgcgcaaggccggcgcggtgctgctgggcaagaccaccaccccggaattcggctggaaaggcgtgaccgacaacccgctgtacggcatcacccgcaacccctgggacacgcgcaccacggcgggcggctcgtccggcggcgcaggcgcagcggcggcgttgaacctcggcgtgttgcaccagggcagcgatgcgggcggttcgatccggattccctgtgcgtttaccggcaccttcggcatcaagccgaccttcggttatgtgccgcaatggccggccagctccatgacgattctgtcgcacctggggccgatgacccgcacggtggaagacagtgtgctgatgctgcagaccatcgcccaaccggacgcacgggatggcttgatcggtgctccacgcaccacaccatggctgacgccgggtacggatttgaaaggcttgcgcgtggcctacagcccgaccttcggttacgtcgatgtcgacccacaggtggccaaggtagttgccgaagcggttcgaggcctggaacaactgggcgcccatgtcgagcagatcgacccagggttcagcgacccgctggaggtgttcagcaccttatgggcagccggcgcagcgcgcctgaccggcgccatgagcgaggcacaaaaacagctgctggaccccggactgttaaggattgcaaaacggggcgaacagctgagcctggacgacttcagtgccgcccttgaagcccgcgccgcattggtagcgcgcatggccgcgttccatgagcattacgatgtactggtgtcgccgatgatgccgatcaccgcattcgaagccgggcacgacgtaccgcccggctccggcttgcaggcatggacacagtggacccccttcacctaccccttcaacctgacccagcaaccggcggcgtcggtgccgtgtaggttggcggcgaatggcttgccggtggggttgcatgtggtgggcgcgcggtttgccgatgagcaggtgttgcgggtgtgccaggtgtatgcaaaggcattcccgaccaagcacctgcaggccccaatcaccagaacaccgtaggaccccatgtgggagggggtacacgcagatggtcctggccctatctggctgaggacgaacactgcaactgtgggtacttttcgccagttctacctaaagaccttgggagcaagcctccttccacagtatcgggcgcattcctttacactgtcccccattcatccccgggggcttcatggacatcgaactggcacgcaccttcctcgaaatcacccgctgcggcagcctcgccgcagcggccgagaaactgcacgtcacccagaccgccatcaccgcacgggtcaagagcctggaaagccaattgggcagcacactgttcgtgcgcaaccgcgccggcgcccggctgaccgccgatggcgaggccttcgtggtgtacgccaaccagttgctgcagacctgggaggccgccaaacgcgacctgccgctgcccgatggctatcgcaacgtgctgcacatcggtggcgaagtcagcctgtgcaacccgctgatgctcggctgggcccaggccctgcgccagaacattcccggccacgccctgcgcaccgaaatccgcgaaggcgaatacctgctgcgccaactggagctgggtgtactggacgccgccctggtgttccagccgcagtactggccgggcttgcaggtggagcaggtgctggaggaaaaactgattctggtgcagctggtgagcaacccggcgccctatgtgtacatcgattggggacccggttttcgtcaacaacacgacgccgccctgcccgacaaggcccgcgccgcgctgagtttcaacctggggccgctggcgttgcagtacatccttgagaacggcggcgccggctatttccggacccgcgtggtgcagagctacctggacagcggcgtgatgcaacgcgtgcccaaggcgccggagttcagcttccccacctacctggtgtattcacgggcgcgagactcggcggtgttgcaacaggcgctggggttgctgcgcgaggtggtcaaggccgaaagcgactggtcgcaacgctgggacccgctgatttgaagcaacaatatccgccgcgcatgctagcctgcgggtgtttccttttgcagccttaccgatgaacaagaaaaagtccgtcaccatcagcgacatcgccaaacaggtcggcatgaccaccatcacggtgtcacgggcgctgagcaaacctgacctggtcaagccggccaccctggcacgcatcctcgaagtggcgcgggagctggactacgtgcccaacgccttcgcccgcggcctcaagcgcagtgaaagcctgatcatcggcgtgatcacggcgtcggtggacaacccgttctacagtgaaatgatcaaggcgatttcccgcgaggccaagcagcacggctacaccatcatgctggtggacaccgatgagctggaagaactggaaagcaaggccgtggacaccctgctgggctaccgcgtggcggggatcatcctgtcgccggtctcggatgagccgggctaccagcccgactacctcgaacgcctggccaacggcaagaccccggtggtgctgctcgaccgcacgatccacgacagcccgttcagccgtgtggtgctcgacaactaccacagcggcatccaggccgcgcactacctgctgcgccagacgcccgacctcaggcgcctgctggtgctgaccggccccgaacattcacgcatcaccgtggagcgcctcaagggcctgcgcgaagtgctggccgaacacccgcaggtgcaggtcgaagtgcaggccggcgactacacgctgatgccctcctacctgcataccctcgactacctggccgaacactcggcgccggacgcgatcatggggttcaaccagttgatcaccctcggcgcgctgcgcgcgttgcgcatgcacaacatcccccacgacagcctgaccatctgtggcatcgaccgcctgcccttcgccgatatcttcggcgtgcccatcgcctgcgtggcccatgatgcgtccctggccggcagcagcgcggtacgcctgctgctcgaccgcctcgaagacccgagcaagccgcgggacaaggtggtcatcgctggccagttggaaaacggctaacgactggtataaccgccgtcgatgggcaggctgacgccgctgatcatgctcgccgcgcggctcagcaggaacagcaccggcagggccacttccgcggtttgcgcaaaacgccccaaaggaatcgccgccagcgccgggtcacgcttggccggtgcggaccacgccatggtcgccatcggtgtgagcgtgaccgttgggttgacgctgttgacgcgaatgccgaagcggccccactcggcacattgcacgcgggtgatcgcatccagcgccgccttggaggcgcagtagccgaggtgatcgtccagcgccaccaacgaggcctggctggagacgttgacgatgctgccggcgatctgcgcttcgatcattttcgccgccacacggctggcgacctgcgcagcggcgcgggcattgacgttcatcacctggtcaaacgcctcggcgctgatggcagcggcaggttccaggcgcgagatgccggcgcagttgaccaggccgtgcagcggcggcaggtcttgcagggctttgtcgagggccgtgctgtcagcgatgtccaggcagaggctgtggcaaccgagttgggccagggcctgcgcgtcgcggccgagggcaaacacgtcggcgccgctggcgatcagttgcagggcgatttcacggccaatgccgctgctggcgccggtgacgaggatgcggtggtgggtgaagtcgaaggcggcgttcattcagttctcctgcaggctgtgcatgatcggtttcagggccggataaagcttcaggtattcgccgaatgcacggtcatacgcctcgacgttttgcgccttgggctcagcgcgcagctccagttgcacccagcccttgtccatcgccgcatcactcaccaaccccaccgtatgcgccgccagcaacgccgcgcccaacgccgcctcaacctcctgaacgatggtgtacaccgggtaccgcgtgacgtcggcgatgatctgcatccacaggtccgaatggctcgccccgcccaccacgatcaagcgcgggtccagggagtgcgcaccgcgcgtacccgcttcgatgttatgccgcaaggcaaaactcacgccttccagcacggcgcggtacaggtggatcctggtgtggtacaggttcaagccgacaaaactgccactggcgcggtcatcccacaccgggctgcgctcgcccatcaggtagggcaagaacaacaggccctcactgcctgccgggatgtgcatcgcccgctgttccagcagcaccaggctgtcctggccgctggccttggcctgttgctcttcggcctggcagaactgctcgcgaaaccagctcaccgaagccccggcggtgatcgcaccaccgaagatgtacaggtcacggtggccgttgtagacgtggggcatgctgaccaggccatggcgcgcatccacctgctggttgaggtaaccccagcacatgctggtgccgatcatcgccacgtggttgcccggttgtgtcacccccgccgccagcgtggccatggccgcatcgacgccacccgccaggatcggcgtgccggcctgcaggcccaggcgtgtcgcccaggcctcaagcaaaccaccgaccacctccccggaatgcaccaagcgctgcggcatcatggcctgcgggatacccagcgcatcgagcatctcggccgaccagccacgcgccttcacgtcgtagacgccaccgatgttgccggcactgctgtggtccaccgccaactcaccggtgaagcaccagttgatgtagctgttcggtggcagcaggtagcgggttttcgcccacacctcgggctggtgctgcttgagccagagcatcttggtgaaaccgtagtagctgtccaccgagttgccggtcacctcgaacaggcgctccaggtccacatgctcgcgcacccaggccacttgctcgccggcgcggcggtccatccagatcaggcacgggtgcagcggtgtgagctgcgcatccaccgcaatccccgagccgccatacaggctgctgatgcacagcgccttgacctggtctttcgccacagcggccttggccatgcactgcgccacgcaggcctcgacggcgtccagccagacctgcggccattgttcggcccagcgcactttcggggtatccacgcgatacccctggctgtgctgggcgatgatcgtgccgtgaccatccaccagcagcgccttggtgctctgggttccgatgtcgacccccatcacgtaattcatgttcaaaccaccggcttcaacagcaccttgatcgacttggtcgagttggccaactcaaaggcttcggcccagtcgtccagcgggaagtcatgggtgacgatgcctttggaggtgaccaggccgcgctcgaacaggtcgatggcgatcgggtagcaatacgggccgaggtgcgcgccgcgtacgtccagttccttgcggtcgccgatgatcgaccagtcgacgctggtctcggcgccgaacacgctgaactcgacaaaacgcccgagcttgcggatcaggtccaggccctgggtgacgccggccggtacgccagtggtttcgatgtagacgtcgcagccgtagttgtcggtgaggccgttgatgatctcgcgggcgttgtcgcgggccgggttgatcaccacgtcggcgccaaattgcttcgccagttccaggcgctcgtcgaccatgtcgatcaccaccagtttcttcggggtcttcaacgcggcgacctggaccatgcacaggccgagcgtgccggcgccggcgatcaccaccacgtcatcgagctggatatcgccacggttgacggtgtggatcgagcaggccatcggctccaccagcgccgagtcttccagcgacaccgactcgggaatcttgtgcacgatggcagtcttggggatgcgcatgtactgggccatgccgccttcggccacttcacgctggaagccgaagatgttgtgcacttcgcacatccagtacttgccggacttgcagaagcggcacttgccacagggcacgatctgctcggcgatcaccttgtcgccgaccgcgacttcaaagtgctcggcggcgccctcgccgacttccaccacataaccgaaaaactcgtgccccggcaccaccggcgccttgacccaggggttgtcgccgccccagaacatcgcagcgcccgagtggcacttgcagtcactggcgcagatgccgcaggcggcgatgcggatcaccagttcattggcgcgggcctggggtttaccgatgcgttccaggcggtagtctttggggccgtggcagacgacggcttgcatgtcggtgtgcttgtccatggtgtcgagtcctgtgcttgttaggagtttatttgtggcgctgacggctgatgaaaatcgccagcaaaatgatcgcgcccttgatcacgctctggacgtagggcgacacgccaagcatgttcaggccgttgttcagcacgccaagcagcatggcgccgagcaaggtgccgacgatcaccccgcgcccgccggcaatcgatgccccgccgagtaccacggcggcaatcgcatccagctcgaacgacacgccggcattcggctggccgctcatcaggcgtgaggtgagtaccagcccggcaatcgctgcggtcaggccgctgatgccatacaccagcagcttgaagcgcgcggcacgcacgccggagaggcgcaccgcttcttcattgccgccgatggcgtagatgtagcggccgatgcgcgtgtgttgcagcagcacataggcggcggcgtaggtgatcagcatgatcaggatcggcacttcgatgccgaacaggctctggcgaccgaagaagccgaaccactccggcagcccggaaatcgggtagccgtcggtgtacatcaggcccaggccacgggcgatgcccatggtcgccagggtcacgatgatcggcggcatgtgcaggtaggcgacgaacaggccattgccgatgccgaaggccacgccgatcaacatccccgcgccaatcgccaggcccggcggcaggcccgcgaccatcaacccggcggtgagcgtgccggacaacgccatcaccggccccaccgacagatcgatgccgccggtgagaatcacgcaggtcatgcccaccgcgatgatcgcgttgatcgacacctggcgggcgatgttcgacaggttgctggcggtgaggaaggtgtcgctggcgaggatcatcaccagggtcaccaccaccagccccacgaacggatagaacgccggcgagcgcaccagccgcgccaggttcaggcgcagccggctgctgtcgacggtgttaatggacgtattcacttgagccccctgttgcatggcgcatgacctcttgaggattgacggcggacgcttcgaggaccttgacgatggcgcccttgtgaaacacggcgacgcggtcgcacatgccgatgacttccggcagctcggaggaaatcatgatgattgcgtagccctgttcggtgaggctgcgcatcagcgcgtagatctgcgccttggcccccacgtcgatgccacgggtgggttcgtcgaacaccagcacgtcgcagtggtggttgatccagcgggcgatcaccaccttctgctggttgccgccactgaggttgaacacccggctttcgccgctgggggccttgatcgacagctggcgcatcaggtcttcgacactggcgcattccctggccttgtcgatcaggcccgaggcgttctggtatttgggcaggttgttcagcgagatgttttcacgaatgctgaaatcggtgatcagcccttcgctcttgcggctttccggcagcaggccgatgccgtgggcgagcgcctgggccgggtcatccagggtaattttctcaccgcgtagccacacgtctttgctcaccgacggcagcgcgcccatcatgcccagggccagctcggtgcgaccggaaccgaccagaccggcaaagccgaggatctcgcccttgtgcagttggaagctgttgcgggggccgttgcgcaccagctgaatgtccttgacctccagcaacagcgggccgcgctcggtgttcggtttgggcggaaaactgcattccaggcggcgcccgaccatcatctcgaccaggcggtcgatatcgctgtcggccacgtcggtgacgcccacattgccgccgtcgcgcaacacgctgatgcggtcacacacctggaaaatctcctccaggtgatgggagatgaaaatcaccgccacgccctggcgcttgagctcgcgcatgatctcgaacagcagttcggcctcgctgggggtcagcgtcgcggtgggttcatccagcaccaacaggcgcgcatccagggccagggccttggcgatttcgacaaactgctgctcggccacgctcaggtgcttgaccgcacattgcaggtcgatggtcacgccgaggcgcttgaacaacgcctcgctggccgcgaccatttcgcgcttgcgcagcaggccgaagcggttgctcagctcgtggccgaggaagatattttccaccgccgtgaggtagggaatcaggctgaattcctggaacacgatgccaatgccggcggcgattgcatcgcggtaggtcgcgaactgccgggcctggccatcgatcaggatctggccttcgtcctgatgctcgacgccaccgaggatcttcatcagggtcgatttgcccgcgccattttcgccgagcaaggcatggatctcgccgcgctcgacctgcaggttgatggacttgagggcctgtacgcccgggtaccgcttacagatgttttccagcttcagaagactgctcataccgccgacctcgtattcagaaggagaccgcaagccccacggatggcgtggggcctgggtgatttaccagctgaaatccttggccttggcctggtcgatcaaggtgatgtccaccgggatggtggccggcacttgcgagccccacttcttggccagggcgatgcccagggcaaggcggatctggtcacgagggtattgcgccgaggtggcgatgaatttgctgccgggtttctggatcgccttgatcgcttccggcgcgccgtcgacgctgaccagtttcacgtccaggccgctggcttcgatggccgagagtgcgccgagggagccgttgtcattcacgctgaaaatgcccttgagggtgggctgggcctgcagcatattttcggtgacggtcagcgcctggtcacgttcctgcttgccgttctggatgctgacaatcttgatgtccgggtgcttggccacggcttctttgcaaccacgcacacgctccaggatcggcaccacggcaatgccgtcgaggatcgcgatattgcctttgtcgccgatgctcttggccaggtattcacaggcctggaagccagcgtcgaagtttttcgaaccgacaaaggaatccagcgggccgtccgcctgggcatcgaccgcaaccaccaccacgccggcggcgtgggcagacttgacggccgattgcacgccgaccgagtcggtggggttgatcagcaggatatcgatgcctttttgcagcatgtcttcgacgtcactgacttgcttggacacgtcatgacgggcgtcggtgatgatcagtttcgcgccgatggtcgccccggcttcttccagggcgtttttcatggtgacgaaataggggttgttgatttcctggaaggacgcgccgatgcggatcggcttggcggcgtcggcaaaagcgggggcagcggtaccgagggtgatgcttacagccaataaacacagggttttcgggagcattttcatggcgtggttctctgttttgtttttattgttagagcaaatgttatcgttaacattttgcgagaagctaacaaggaaattcgggtgacgcaaggggccactggtcggcttcggtcggaatgtgggagggggcttgcccccgatggcggagtgtcagttggcgatgtaagtgactgacctgccaccatcgggggcaagccccctcccacacgtgttcatgtgtgcaccacaaaacctcgcacaatcttgagtaccaactaagctcagcctccaacaaaaaagaccgagctgcctgccatggcccatcccaccgagacctttcgcgcccgttaccgcgcccaagtcgcgccccactacaacccctggctccacgccagtttcgtgttcggctacggcatcgcgtgcatcagcctggcctggtcatcgacgcaccagatcaccgcgctgcaatggctgaccgtgcccgcgacgctggtgttcttcaacctgtgtatctacttggtacaccgccacctcggccaccacaaacacgccctggcccgcctgttctatgcgcgccacaccggcgatcaccacagttttttcacccccggccacatgacctacgacagccctagggactggcgcgtcattctgtttccggcctggctgatcgtgctgcacagcctggcgatcaccctgcccgcctggtggctgctccagcagttgagccccaacgtcgccggattgttcgccgggtgcatgctcctcggatatttgctttacgaattgtttcacgcctgcgaacacctgcccgccgaccacccagtggcacggctgccgtggctgcgccagatgcaccagttgcataccctgcaccaccgccgtgagctgatgcaggggcacaatttcaatatcgtcctcccgctgatggattacttgttcggcaccctgtactgggagccgggcccccacgacaaccaggaatcgtcatgagtacccgtcccaaaaaactgcgtcatctgttgtttgtgctgtttctgctggtgatcgccttcttgctgttgatgcccaccaaagtgcaaccggtgaactggacaccgcccaagccgccgtcgctgaaggacggcccctacgccgaaaaccagcgcctcaagggcgtgcagaagatcggcgcgcaggacatcgccgggcccgaagccttgctgctggatgcccagggttatctgatcagtggcttgcatgacgggcgcatcatccgcaccgcacccgacagccgcagcctggaggtactggccaataccggcggtcggcccctgggaatagcgctgcacccggatgggcgcttgatcattgccgatggcatcaagggcctgctcgccctggatgcaaaccgccaactcactaccttgagcacgggagccaataacgtccccttcggtttcaccaatgacgtcaccgtggacgccagcgggcgttatgcctacttcagcgatgcatcgagccgctggggttatgggcaggacggcgaagcggtgatcgaacatggcggcgatggtcggctactgcgctatgacttcagcaacggcaccaccgaggtgctgctcgaccagctgcaattcgccaatggcgtggccctgggcccggatgaacattatgtactggtcaatgagaccggcgcctatcgcatcagccggtattggctcaagggcgaacgtgccggcagccatgacctgtttatcgacaacctgcccggcctgccggacaacctcagtttcaatggccaggaccgcttctgggtggcgctgtattcaccacgtaacccgctgctggacagcttcgccggctaccccatgctgcgcaaagtgatggtgcgggcgttgatggtggtgcccaagccgatcgagcgcaaagcctttgtgctggggttggatacgcaaggcaaggtgattgccaatttgcaggatggcagcgcgggcaactactcgcccattaccaccgctcgggaatacggcgagtggttgtacctgggctcgctgaagagtacgagcatggcgcgcctgccgttggcactggcgttggcgccctgacgcaaaaagggcatacaggcgctcggcctgtatgccctggtggttaccggttaaacacgcttagctcttggtactgctgagcagggtctgcttgcacaggtggccaaagctgacgaactggacattgtcaccgccgacgccaatacccggatattcgagcacttccatacgccatacgccgtagttgaagtcggtacgccaggtgtttttgtagccctgggcgtagtcgacaaaggtggtctggaagtcaccgaagcaggtacctacgttgatcgtgccccctgccagaccggcgctgttggtggccgccgaatagcctttgtagacaatagcgccggtgtccgggttgatgtgttggtcgaggtagacgatcgggtgcagccccaccaacggtgcgccggtgctgtccgacagccccatggtccagctcaggtcgcgataggcctgggtggtcatgtagccataccccacgttggacgcggaggaaggaatgcgcaacacgttgccttcgcctttcacatcagggttgttcacccgagggttggaaccgaaggacaggttgtatttgcccgtcgcgctccaaggctcattcggatgttggttcggacgaacacgcaccttgaccaccccgccgacacccgggttcgggatcgacgtcgacacgacattcgcgcccacggtgacccactggctgccatcgaaacgctcaaggatccacttgttgcgcgtgctaccactggccgcgtcggccgtcagcgcgatgcctacgctctggccacggaccgccgtgaaatcaaagtagtcgacgtcgttgaggctgtcggcgttgcctttgatgtagttcagggtatccggcagttgaaacgccgtgtcgggcgtgtcattgggctcataggcatcgatattggcatccaccgccacaccgaactggaagctggaacccggcaccgctgcgttggcttccatgaaccagtagtagtcaccggcaggcaccacaccgctcaggctttcatcgcccgtgcctgggttattggaggtgcccagcgggagcggattgccttgaccatcgtcctggaacagggtcaacgacatgtcggtgcctgcggtctggccgaccagcaacgcgttgatgcgcgccttctgtggcaggttgaagtggtagcacagcaggtcaccggtctgcacgccattgagggtgtacaactggttcacgtccagcgtggtttcgcagccctggaccagtgccgcctgcacggcggccgctgcctgggcatcggctttcctgacctgggtcaccggcgccggcgcggcgtgatcttccaccaccgaatcggcctgggccttggcggcgaacgccggttttttcagttgagcgcccgctttgagttgctgcttgagcgtcgcaggggccttggtggccggtactttaccggcggccttgaggctttgcttgatgtcagtttgaacggcttgggcagccaggtgagggtattgctcggccagggcgaaggccgaaacgaagcaggaggccgccatggccgcgcccagcataaaggcttttttcgatttcattttttatccatccatagttaaaaagtgaagctcaggtgacgtccggtcacctgggatggaatgtaggatatgactggatggatgtacagtattttttgaaagaatttcaatttctatggaatggggatgtcacaccaccagcgccagaagctccagacagctgtcccgaaggcccagatatagccaactttataaggccacacaatccaacgcttgagcgccacaggaactgacgctaattcagcctccgtcacaatgccggcttccacatggcgctttgagtctgagaagaactcggaaataagcaacatgcgatattgcctgtcgatccactggtttcgcttccaaaatcgcttattgtcttggaccctttcgttctgacggaaataactttccacctcatcgagctttgcatattccgcaaaaatcatcagtcccaagacaacaaacgtcccgacaaacaacacgatggagtagatgagaaaaaaattcatggttaggctccctcgggtaggaatatcaaatccccatcgacttccatgatctctcctcccaaaaacgccccagcactaccgaccccctcacctcccacataccctcccgctgagcctccgataattccgcaggcgagttcacctgttcccttcatgcgaatgcctaggaacattgtgcatgccctacgagcggctcctgcgccgattcttcccaaaaaggcagctcctgagactccccccgccaacctccccgtctccacatacttcgcccgtctacactgcacctcccgcccctccacacacgcctccttgatctccaaccccgccactcccacatccagcgccaaccccacataagtccctttacccaaccacttcgacatctgcgcaatctcccgcatccgcttcgcatacccggcgatctcacctttatgcagatagctcttggtcgataggcccaatacctttttcagcgactcattgccctgcaaccccgtccccaaccgtgccgcaccgtgcagttgcacctccaaccgccggaacaacccctggcgctgttgaataaacgccgtcctgtccaacgcaccgtccttcaaccgctgatgcaaccgctcgatctcctccagcgtctgcgccacttcatccaagtgccgcgcccaggccgacgtcgcgctgccgatgccaatcgagcccttcgccatgaaactctgcagcaagtcatagttgtcgatcaccgtcgtgccggccgcagcacttcccttcagatggcggcgtacctcctcggcatgccgcatcaaccaggcctcctcgaccgagcaattcacgctgtggctgtcgggaataatcaccagttgccccggcgccaccaggccggggcgcaggtgccggttcaacacatcaaaatgagcggagcgctggcggctgggggcaccgcccatcagtcggtttttcaagctctgatagtccgttacgcggttgttgataaaactttgcgccatgcctcacatcctgtgagcagtgaagatggcgtcgaaatataagcaagcacctgcgccccggacacacgtccaggggggggcgatttacatttgggaagctgcctacgcagcatagaaatacagcctacggaaacaaccctaatacccagtcatttccaggtaacccaccccaccctcgaactgcaccgggccttcccagtacgggatactcaggttcatccaggcattcgggttgaccgcttgcgtggtgatatccagctgcttgccggggattttcagcgaccagcgagtggggatcttgcgcccttcaatagtcgtcgtatccagaggcgtcagttggatatctgcgttgtgcagggtttgtgtatggccctcgcgatcaatccaggtgccggtcaggtaggacgtgccatcggtttgccgtacacgaaacagcatcaattgctcgccccggtccaggtgcagggaaaaccagtcccagccggtctggctggcggtcagcggttggctgctccattcgcggtcgagccaggccgggccgctgacttgatacaccctgccgtcaatgctgacgctgccacgggcactgaaaaatggctggctgtagtagtacgaagcctggccctggtcggattttcggctgtagccgtggtcgccctgcagcaccaatggacggctggacgtcaggtgcaggtcgtaggcgaattgcgcaccgctagccttgagttgcatgtccgccagagggctctctgcaccagggcgggtggcgaaattccagtcgtcgatccaggcattgaacggcactgcctgagctccggcctggccgacgccgccgcgtgcgtaacgttcggcagcgtaatggcgggtggcggacgtaacggcggcgtggccgagccacacggtggagtcgtgccagcccgcttgcactggcccggccttgagcgcgttgcgaaacagcgtccactgcacgccgaagacattgccttgcgcgtccttgaggttggcggtgacgtaccaccattcgatacgaaagcccgcatgggggccgtggtcctcggggaagctgaacaccttgcccggcaccacctgggcaaagtccgccgcgtcgctgcccagaccggcaaagctctcctgcggcgcgggtactttgtcgcaagcggccagcagcaaacacgccaacaacaggggcttaatcttcattggcaaacgtcctcaacaaatccgcaggacggctgcggtacaactgccacaacggccaggccgacgccagcaaggtcgccagcatcgccagcccgagcaattgcgccagctgccacgggaacacctgcagcggcaggcgccagccaaacgcctgcacgttgatcactgcatccaggcaccaggccaacagcaggccgagcggtaccgccaggaccaatgtgagcaccgccagcagccaggtctggccgaggttgagcagcatcaattgccgacgcgtgacgcccaatgcccacagcggtgcaagctggcccaggcggctctggctctgggtcaacaggctgatgaacaatgccacgccggccacacccaaggtcaggctgttcagcgcggcagtggcggcgaaggtgcgctcgaacacctggctcgaccagcccttgagttgctgctgatcgacgatacggctgtcgtccagagcaaaggcgcgttgcacctcacgtaccagcggcgccacgtccggcggcgagacccgtaggttgaaacgcgccggtgacagcgtcggccagtgcgccagcagatgttgtgaattgaccagcacatgccccttggggttgccgtagtcggcgtaaacccccaccaccttcggcgaccacacaccttgaggcgtggggatgttcacggcatcgcccagcttcaccccgagccggcgcgccagttgctcgctgagcatcaaggtgtcgcccttctgcaactggtcccagggttcgctcgtggcctccagcagcggccaatgctggcggtaggtgggatcatcgaccacaccaaacaggtccgccggccagccctgcacttgcacggcgacctgccaggtgggcagcacggtctgcaccaacggctgttgcaccagccaggtgccgagttgttcggcctgggcaggggtttgtgggttgagatacagctcggcggtcagacgttgctccagccagttgttgaaggtatgccgaaaacccgaggtcatggagcccgcgccgatgtttgcggccagcgccaagagcaacgccatcagggccaggctcaaggccggcaactgctggcggcagtcggcgagaaaccactggccgagcaccgaacggctacgccccaacacggccttgagcaggccgttgagcagcaccggcaaaccgagcgccgcacccagcagcaaggcggccatcagcacaaacccggcagccaggctattgcccagccacagcgccagcaaggcgatcagcaaggcggcgccagccacccacgcttgacggcgcaaccaacgcccgtgggcttcatgccaagcctgggcattggccagcgccagcaagggcaggcgcgctgcccgccacaggctactggcaccggcgagcagcgcaccgatcaggctcaagcccagccctgcgccccaccaccaggggctgaggctcaactgccccgggacttcggcgccatacaaaccacgcaggctggcggccacatcgggcaataacagactggccagcaagtagccactggcgacgcccagcacacctcccagcaacgagagcacgcccagctccacactcaggctcacaatcagcatgcgcacgctgaccccacaagcgcgcaacgtacgcagcaacccgcgccgttgctccagggccaggccgatggcggcatgcacaatgaacagccccaccacaaaggacaggaagcccagcgcgtcgaggttcaggtgaaagctctcggtaaggcgtgcgaggttgttgtcctcgccttgcttgagctgcaacccggcgggcggcgtgggctggctggcggcgaatgccttgtccaccagcaggcgcgacaggcgctcgggcatctccagcacaggctgggcaaacccgatgtcggtgagcaacaggccgggcgccatgtctggttgggcttgcaatggcggcagtgtgcggccgcccacggtggtcggttgctggccttcgcgcagtcccaaggcctgcaaggtctgcggcgcgatccaggtacgccccggcggatcaaagaaggcgagcatctgcgcctggctcaagcgctgccccgccacggcgccgctgccgggcaacgacaacgggtcgatgcccatcaactgcaggcgtacctcttccaggcccttgagctgcactcgcccctgcaccaccggcgagaccggccacccggcgcggcgcaattgggcgaagatcgcctgggggaaactcgccccgtccggcgcaccgaggctggcctggggttcaccgccgatcaattggctggcacgggcatagctgtcacgcgcctggctgttgagggcttgcacgccgatcaacagtgcggtggccagccaaaggccggtgagcacgctgaaaaactgcacaggatgccgtcgccagtggctgagcaatgcgcgcaaggtccactgaaataccgccatctcaggcggcgcctgcggcgagaacgcgcccacgctgcaacaccacctggcggtccagccgtgcagcgatgcgcgggctgtgggtgaccatcaacaggctggtggggctgtcgcgcaagaggtccagcaacagttgcagcacttcgtcgctggtcgcctcgtccaggttgccggtgggctcgtcggccaacaacaggcccgggcgtgatgccaatgcgcgccccaccgccacccgttgctgctggccgccggagagctgttccgggtagcgcttgagcaaatcccccaggcccaggcgctcgaccagctgcgcctgccactgggggtcaaagcgtcccgccagccgcgcctggaacgccaggttgtcctcgacccgcaagctgccgatcaggttgaactgctgaaacaccaggccgatttcggtacgccgccaatgggccagttgcgcttcgctcagttgatccaggcgctgctcgcccacctgaatgctgccgccatccacacggtcgagcccggccaccaagtgcagcaaggtgctcttgccgctgcccgactcgcccatcagcgccaggctgctgcgctggcccaggtgcagatcgacaccggccagcaccgccaacggcccctggggggtggcatagcttttgatcacaccttgcacctgcaacatgacaacactcgtttgatgggcggccatcgagaataacggctgccgaccaaggccacgcaaatttttcacatcgatttcaccagctgcccacccgtgcctcattaaattacccaccaagcctcacttgccggcaacttgttagttgtcctttttcacaactttttacatgcaaggtgttcagcgaaaagacagccgtcgtgtgacagcctctggtcccactaaggacattcgctaaaacgttgcgcctaattaatacaagactgccaacaatgcccatggtgaatgaagtggttgaccttaccctgaccaaaccgcgctcgccccgggactttttcaagcgtttgcaacgactctggctgggacttgcggtggttggcctgctgctggtgtgcagcctgttctggccggcgtcgccacgggacctgggcatcggcaaccgcctgctgacctcgcaagtgatgccgctgtggcgcgacggcgacctgatcgtactggtgcgccatgaggagcgttgcgatcgctccgccaacccgtgcctgggcccgatggaaggcctcacggtacacggcagccaacaggccgaaaagctcggcaacgcctttaaatccatggggatggacaccagcgatgtgctcgccagtcccgctatccgcacggcgcagaccctgcgtttcatgttcgacaaaaacgagctgacctcgggccaacaggccatctgcggcacggccatgggcgaggaattgctcagtcaaaagacccccggacgcaatctggtgttcgttacccacagcggttgcatcgccgacttcgaaaaaacccagggcttcccccatgccgcgttccccgaatacggcagcgcgttgttcgtgcaggcattgcccaacggcaagttgaagatcctgggcatcgtcaacaatccggattggcctgccgcgctaaaacagacccactaacttactccccgccctgttcagcaaaaagacagccctgttctggcatgtttagttgcgccttttaactaaggacgtcatgaatattttctgcaattgtgtgaacgctgtgattttttccactattacttcatcacttgaaacccacatctcagagcgtcagggagcgacgtttgcatgacccgactaaaacccctgccggtattactgctggccttcgttgcgttttacctgctgcccctgggcctgcatggtttgtggatcccggacgaaacccgctacgcccagatcagccaggagatgcttcaaaccggcaactgggtggcgccgcatttcatgggcatccgctatttcgaaaaacccgccggcggctactggttgattgccctgggccaggcggtgttcggccaaaacctgttcggcgtgcgcatcgcctcggcgctgaccaccggcttgagtgtgctgctggcctacttgatcgcccgtcgcctgtggaatgacccgcgcaaaagcttcgcctgtgccctgctctacctgagcttcggcctggtggccgggcaggcggggtattccaacctcgacccgcaattcaccttctgggtcaacctgagcctggtggcgctgtggtttgccctcgatagtgccacgctgcgcggccgcctctgggcctgggtcgtcgtgggcctggcctgcgccatggggttcatgaccaagggctttttggccttggcgctgccggtgctgattgccgtgccgtacatgctctggcagcgtcgcctgggtgagttgctgcgctatggcccgttggcgatggtggtcgcagtactggtgtgcctgccatgggcgctggccatccatcttcaggaaccggacttctggcgcttctttttctggaatgaacacattcgccgcttcagcgccgacaacgcgcagcatgtgcggccgtggtggttcttcctgccgatcatcgccgtgtccagcctgccgtgggccggtctgctgccaacgactctgcgcaagacctggcaggaaaaacgccagccggcgatcaccttcctggcgttgtggctgcttctgcccctgggcctgttcagcttgagccgaggcaagctgccgacctacatcatgccgtgcctgctgcccctggcactgctgatgggccatacgatgatcgacctggtcaagcagggcaaagcccgcacgatctgcctcaatggcctgttcaacttcgtgatcggcatggcggccatgatcggcctgatctacctgcaaatcgcccggccgctgtacagcaacagccacgccgagatgttcagcttgtccctggccttcatcgtgctgctggtgtggattctcaccaacctgctgcaagtgattcgcccactgacgctgtgggcaatgcctgcactgggcatcggcctgctggtgatcctgttgccggcgagcatgccgtcgtggattgccgacaacgaaatgcccgaccagtttgtgcttgaacacctggaagaactgcaacagacccaggcactgctgagcaatgaactggggagtgccagcgccctggcctggcgcctgaaacgaccagaagtatcgctgtatgacaccgagggcgaactgcgctacggcttgcaatacgcgggctcggtgcatcgcaaagtggaactggacggggtccaggcctggctcaaggaggcgcgccagcacggctcggtgggcgtgctgctgcgggtcaacagcaccagtgaaatgcgcgaagccgggcaactgccgccaggcggcaaacgctactacaagggttatctcgaattgatcatctacccgagcctgccctgatgacacccttctggaagaccgaacgcggcgccctgctgctgttgctgggcgtcaccgcgctgttgctgctcaccggcctcggcgcacgcgacctgtggggcccggagacccgctgggcgaacatcgccttgcagatgctacagagcggggactacttcgacccctacctcaagggcaccccctattacgacaagcctctgccctcctactggctgatcaccgccacggcccacctgatgggcggcctcgggccgtggtcactgcgcttgccctcggtgatcggtgcgtggctgagtgtgtggctggtctacctgctcggtgagcaactgatgcgcaagggcaccgggctgatcgccggctggatgctcgccaccaccttttactttctgttctgggcgcgggtggccacggcggatgtgctgacggtgtgcggcgtgctggcggccgtctggtggtactggcgcgggccggacgacacccggctgggtcgctacaccgtgttcttcctgttgctggccgtgacctcgctgttcaagggcttgatcggttttgtgctgccgggcctggtcctgctgccgcacctgctcggcgagcagcgctacaagcgccatctcaacctgcgcttgctacttgcgctgctaatcgccgccgcggtatatgccgtgccgttcgtgctctcgcatatctacggtgcgcccacctatgggcaaagcggcctggcgctggtgttccgcgaaaacgtggtgcgtttcttcgacccgttcgatcacatgggaccgatctacacctacctgatttacctgcccgcctacaccctgccgtggctgccgtgctggctgctcggcctgtggctggcgctgcggcactggcgccagaccccgcccaacgtgcgatggctggtgtggggcctgggcctgttgtttgtgttcttcaccgccagtggcagccggcgcagctactacgtgttgccgctggtgcccttcgcccagttgctcggcgcctggtggctcagcgaacgcctgcaggccaggcccgccagccggccgcgctggtacaaagggttcgcctgcgccgccgtgttgatgctgctggtcattggcgtggcctacccatggagcaacggcaatggcggcgtcacccgcttggccgaggatgtgcgcagcgaagcggtcaaacgcgcgccgtgggagcaatggcaactggtgctggtggaagtggacaacaaggtgccgatgtacctgcaaaacggtggcaagccgttctactacgtggccgagacccaggacttcccgcgccagggcgacagcgcagcgttcatggcctggttgcagaaaaccagcggcaaggccttcgacccgcagcgcacgatcatcgtcgcgcagtattccaaggacgacctgacgccgttggcgtacctgggcgcggatcaccaggtcatcaccacccagccggacaatggcgagcgtttgtttcaaaaacgtgagggtggcagcgtggcgttcgttccctggtccaaatagacggcggtcttatcccttcaggctggcggcatggataaatgcctcatccaggctttgggcgtcgtacgcgtccatgaagccttgcgcgtcagtgaaccggttgaatcgcctttggctcagcatataaaaatcatcgcaatgcgcgacgatctcatcgacgttatgtgatgaaaccaagaccgcgacaccctctgccgcagccccctccagacagcgccaaatgtgataacgaaactccggatccacacccgcagtgggctcatccagtatcaccaggtccgcgttggcacaaagcaacgacaacgtaaaaaaccagcgtttctctccatagctgcagagcgcagattttttgttccagatctcgcagtaccgctcggcgatgccggggctccatttttcgattttatcgagtgcatgttgttgggtgacctgggtgtcggagcaaaacagcatggccattttgaagatgtcgaacatgcgaaatacagggggtgtgctgatgacctgcgacaggtacagcagcttggagaaggagctgcttatttcaccaccctccactttcttcaggccgcacagtacgtcaaaaaacgtcgttttaccggagccgtttgggccgagaaggcctgatatggagccggccatggctgtcagagaagccttgctgaacactacatggcctgggtaactgaccccgagtgagctgacgataagtttcttcattagtatcggctccagactgggtttatgagcaataaccgaaaggtcacgccaaaggaaatagaaaaggccaccatgacaaccagcatgacttctatcgatcccacgaccccctctagcattatttgattagcccatctcattggatttaacagcttgatgacttcgagggcagtatgagatgtactggcactgacaattccaagcgccaacatcaaacacaacaagacagaaaaaacagtactggcattttgaaaacttaatggagccaatgtaagcaacagcgaaaatatagagaacaagagaaagcagatataaaatctcgacgcaacatcccacacctccgacacttccactcccgccccaaaataaagtttcgtcagaccgtagaaaaccatgcagtaaactatcgacaagatggaacaagcaaaaaactgcccaaacagaaagaccagcttagtcggtttagcgtagacaaatgaacgcaagaagccactttctctgcgcccgacgatataaaacgccaggccgaaaaacgctacgctacaggcaataaaggcatagaaccaagatgtaacggctagataattgatcgtccgatcgtcatcgggcgtcctcgcataggtgatcaaatagaacgtcaccgcgggagaaactaccatccagaacagtgcaaccggttccttcaactgttccttgataaacaatgctgccagtaaaaagggtttggacaatagataaccgctcatgacttacctcgcaggaagcgtgaccgactctccatcaaaacttagcgtatctggaagaacattcaagatagcctacttttaacaggctcatgaacatgagaaatttcactcataaaaatcagacattcaataattgcatacgacgatttttttcgacccctcccacagcacatcaaaaccctcaacaagattagtaacttactgaacacactacaaaaacaatcagatgccttattacttaacatataccgaactgttgtaattttttttcagaaaaaaacgacaagcggcattgatctgcgatgcgccccctttggtctcgtagcagtaggcatcactcactgcgccatacacccgcaatcaagtatccggattgatcctgcttttgcgctccgcatcggcctcgcccgtgtccatccgcaaacccgccacctgcgcctgcaccgcccgcccctccgcccggttgcggatgaaaccggcccgggtgaaccgttccagaaacggcaccggcaaggctttgtcggcggttaccgcaggttgttcagccacatcgccaaacaaggtgtacgccgcactcggcaagtgccgggtgttgaggtcgctggtcagtcggcccgcttgcaggacgatagcgcggttggtcacccgttgcaggtcagacaagcgttgggaaatatagaggatcgccacgccccgggcgcgctggctgtcgatcaggccgagcaggcgttcggcgtcggtttccgacagggcggcggtgggttcgtcgaggatcagcaacctgggttgcagggcaaaggcccgggccagtaccagcagttggcgctcggcctggccaaggcgttccaccgggtgttgcagcggcaggtccaggcccagcccggcggcgatggcttcggcgcgttgcagcaggcttttgcggttgagcagaaaatccgcatcgggttgacccagttcatccagcaacaggttctcggccacactcaggccaggggcgatggcgtcgtcggggtcttggtgcaccgccacgatgccaacccgccgcgccgacaacggcgaggcaaagcgttggcgctgcccatcgacccacacctcaccggcatccgccgccaggctgccgctgaggatcttcaccagcgtcgacttgcccgcccccgtggcaccgagcaacgccacgccctcgcccgggtaaatatccaggctgacctgatccagcgcccgttgggcaccaaaggtcttgcacaggcccagcaggcggatcaggggctcgggggcaaccgggttgctcatggctaatctctaaggcggaacgatgactcattacaacgtgcgaacacgctgatttattccgaacaacaatgagttaggccccggattaaatgcattacctcaagaacaatccaatagctgaatcgcatagccaaatttttttgagttataaggcagttatttgcagcttgaggaatgcgttcagcaaagcaaccctgtggaccacagggacggcaacggcatcgttgagcgggacggctagtggcatttggtcatgctttgtaaagggccagcaaggcgtgtcgcttttaattgcaggacgtttcctagacaatctccgccgccttgtgcctgccggaatcggtggctagtctgcggtccgtcactggttttcagtgatcgggtttagtcgcccggaatgacacaaggcgcatggtcacatgaagttttatggtggctgtgcgcagggcaccttcgggtgcgccggatttccttgtggccggtcgactaacctgcgtacagccgccacccatcgtttagtcgcgccaggtgttggctcctattcacacaaggaactacaccatgaacaaagccctacccgacccaccgcaagacctcaccaaagaccgcgccgccttcaaccgcgccattgaccattacctgccgtcacaggggctccacgccctccacgaagacctgagcttcgaagacgccctgctctacaccgccagtttgctcgacagcgcatccactaccgcgctggattgtggcgagacactgagcaaccccgaacgggcgagaatcctggcggtctggcatttgctggagatcgccaaggcgacagtagatcgctccatcgagtgcctgaaacctgcgcctgcgactgcctgaacacggtcctacaaagcagcttacctatgtgcgtgagctgacttggtgagtcatcccgacaagagtgctttggttgctttcgactgggcaggcattctgtggcgagcgggcttgccccgcgttggagtgcgtagcgctcccagcttttttggggctgctacgcaacccaacgcgggacaagcccgctcgccacagttgcagtgttcgcccttgatggaatggtatcagccagatacttgaaagggctggccataagggcgtaaccctaagcagcggttacctaaataacggatatgcccccgtcaaatccgccgccgccgccccaactgcggaatagccgcctgaggcacctccacccgctgaacctgcgtcaacacacaccccgccaattgcgccaccgtcggatgactgaacaacgcccgcgcatccacctccacccccgccttgcgcatccgcgccaccaggttcaccgccaacaacgaatgcccccccagctcaaagaaatgatcgtgccgccccacccgctccaacttcagcacctcagcccagatcccggccatcaacacctccaccgccccgaccggcgccgcataggcgcggctcaccaccgcccccaaccccggctccggcaacgccttgcggtcaagtttgcccgccggattgagcggcaacgcgtcaagctgcacaaacgccgccggcaccatgtattccggtaattgctccagcacatgggcgcgcaacgcatccgggctcggcgcctcgccacgcacggtgaaatacgccaccaggcgttcatcgcgaatcaataccgccacctctcgcaacgccggatgcaccagcagccgtgactcgatctcccccagctccaggcgcacaccgcgaagtttgacctggaagtcgttacgcccgaggaactccagattgccgtcaggcaggtaacgcaccaggtcgccagtgcgatacagccgatcaccggccacgaacgggctgtcgataaagcgctcggcggtcatctgctccagccccaggtaaccccgggccacgccgacgccaccgatatgcaactgaccgctcacgcccatcggcaccggcgcatcgtgttcatccagcacatacaggcgtgtgttgttgatcgcccgcccaatcggcaactgcaatgccggcaccggcgcgccgggttccagggtccaggcgctgctgtccactgtggcttcagtgggaccgtagacgttatgcaggcgcaccttgggcaagcgcgcctgcacgccacgggccagggcttcggtgagttcgccgccgccgcacaacacatcggtgaggctgctgcacagcgcggactcttccagctcaaggaactgctgcaacatcgccggcacgaacttgatcaccgtgatctgctgctcacgtatcacctgcgccaggtaggccggttcgcgatggccgtcgggccgtgccagcaccaggcgcatgccgttggtgagcggccagaacagctcccacaccgaaccgtcgaagctgaacggtgcccgctgcaacagcgcgccgccctcggcattggggcacagctgcgagccccagtgcatcaggttgccgaggccacggtgttcgatcatcacgcccttgggtgtgccggtggagccggaggtgtacatcacataggccaggttggccacgctcagccccggcaccaacgggttgccgacaggtgcctggctccaggcgcagtggtcgaagtcgatcaccgggatcgacacgtcacccggcacgtcacgggtggcggcatgtaccagcagcgccaccggctggctgtcgtggagcatgtaggccaggcgctcgcgcgggtagcccggatccagcggcacataggcaccgccggccttgaggatggccaacaggcccaccaccagctccagcccgcgttcgacgcacagcgcgacgcgggcgtccggttgcacaccgcgctcacgcaggtggaaggccagttggttggcgcgttcattgagttcgcggtaggtcagttgcaactcgccggcctgcacggcgatggcatgggggatatgccgtgcgtgggcttcgaaccgcgcctgcaccgtgaaagtgtcggggtagtcggtgtcggtagcgttgaagtccaccagcagggttttcagctcgccggcgggcagtacctggacgtcgcgcaacggtgtctgtggcgcctggtccagcgtgtccgccaagttgatcagtgtgttttcaaggtagtcgagcagccgaccggcgccaatttgctgcggcgccttggccttgatccggaaacccttggccgtgtcgtccacggtcagcatcagcgggtagctgaggatgtcctcactgctgagcaaggcaatgcccggcaccagggtcaggtcacgctcggcgtcggtgtgccggtagttgagcaggctgttgaacaacggcgacgcgccgctgcaacgctgggccagcgcaagggaggcttgttcatggacgagcaaggcgctgagccgggcgtgggtgcaagtgagcgcatccgccaccgttcgcccggccaggcgcacccgcagcggcagggtgttgatgaacatgcccagggcgcggtcggcgccctcgcccgcctgcaaacggccgagcagcacggtaccgaagaccacgtcatcacggccggcgacacggctgagcacctgcgcccaggccaggtggaacaggctggcggtgctcacacccacgccacgcgccagggcacgcaaacgctgattgaggctgtcactcaagccacgttcggcttgttcggtgtgcgcccgatccgcctggcgctcctgtagaccgaaggccagggtcggctcgtcgacatcccccaactgctcgcgaaagaacgcctcgtgcgccgcttgacgtgccggcgaacgggcttgcaccaccacattgcgatacggcaccggcaccggcaactgcgcctgctggccgagcaagtgggcgcggatttcctgcatcaggatcgtggtggaggtggcgtcattgaccaggtgatggaaccgcagccgcgccacccaacgcgagtgctgcggctcttcggcatagtccagggccatcagcggcgcctggcgcaaatccagcggcgcgcacgcttcgcccagcggttcgacgcgcaattgcgcctggcgccacaccacctgcatcggttgctccagggcctcccacaccaggctggtgcgcaggatgtcgtggcggttgatcacctgttgcagggcctgggcaaatgcgtccaactgctcgcgctgcgcaaagctgaacagcgcctgttgctgataaggatcgcgttcatcggtgatgtggtggtagagcaagccttcctgcaacggcgccagcgggtagatgtcctgcacattggccgcgccgccggggatgcgcgcgacgataggcgccaggctggcggggtcgagttcggccagctccggcgcgtccacgtcactgagttcactcgccgccgccagggccgccagggtcggctggccgaacagcacctggacatcggcgcgcagcccgacctggcgcatgcgttgcaccaattgcacggccagcaatgaatgcccgcccagttcgaagaagtggtcgtggcgcccgacctgctgcacctgcaacagctcggcccagatctgcgcgagtacgctttccgcgccggcgtgcggtgcttcgtacaggcgggtgacgaatgcgtcttgggtgggtgtgggcagcgccttgcgatccagcttgccgttggcggtcagaggcaacacgtccagctgtacgtaggcggccggcagcatgtagtcgggcagcgacgcttgcaggtgggcgcgcagggcttcgatcggcaccgcttcacgcgggacgaaccaggccagcaactgcccttcgcgggcttgcaccacggcgtcctgaatgtgcgggtgagtggccaaggccgattcgatttcgcccagttcaatgcgcacgccacggattttcacctggtcgtcattgcgccccaggtattcaaggttgccgtccggcagccagcgcaccaggtcgccggtgcggtacatgcgcccttgggtgaaggggtcgtcgaggaaacgctcggcactgaggtcgggacgcttgagatacccgcgcgcgatgccgttgccgcccacgtacaactcccctgccacgccgatgggcagcggctgttgctgcgcgtccagcacgtacaccgtggcattgccgatgggtgcgccgatatgcaatggccggccgacagccatggggccagaggtggcgaccaccgtggcttcggtagggccatagttgttgatcacagcgaaggactgcgcctgggtgaacgcgcgcaagcggtcgccgccgatcagcagggtgcgcagtgtcgggtggtgcaggccctggctgaaggcgtactcggccacgggcgtcggcaggaagcacacgtccagcggctgcgcctgccaccaaccgagcagcgcgtcgatgtcttcggcgccgtcatgggccggcggcaggtgcagcgtggcgcccacgcacaacgccggccagacctcccaggccatcgcgtcaaaaccaaaaccggcaacgctggcggtgtggctgccggcatgcaggtcgaaggcccggcagtgccagtccaccaggttcgagacgctgtggtgctcgaccattacacccttgggcaaaccggtggagcccgaggtgtagatcacataggcgaggtgggaggggctgaccgctacgcgggggttggtgcccaggtggaaggtcgggcggtcaagctgaatcaccggcaccgtcaagggcggcaaccgatgcagcaaatcgtgctgggtcagcaccactaccgggtcgctgtcgtgcagcaagtaattcaggcgctcggcgggatgggccgggtccaccggcacgtagcaggcgccagacttgaggaccgccagcaaccccaccaacgtgtccagcccacgccgcgccaggatcaccacccggtcgtccggccgcacgccgctctccagcagttgatgggccagcgcgttggcctgctggttgagttgggcgtagctcaggtgccgcccctgatacaccgccgccacggcgtccggcgcgcgcgcagcctgggcttcgatgcgcgcgtgtagggtctgcggcggcgtgacgggctgggtggtggcgttccattgttgcaaccgcgcctgttcggcgggtgtcaccagggagaaatcgcggatcgtcagcgcggtgtctgccagcccctgctccagcagccaggtaaaacgttgcgccagggccgccacttcatcgtgctggaagtacgcctcgttgtagacgcaatgcaggcacgcggtgtcctggtagcgattgctgcgcaggtggatggccagcggcagcggctcgtggtggttggacaccttgactgcacgggccactgttgtgccgtagcgcagttcatggtcgtcctgctcgaaggacaccgacaggtcgaacagctggccgcggtcgctgcgacgcaggcccagctcgcggttcatctcgctcagagggaaacgctggtggcggaaatcctgcttgagctggtcgcgcaccccacgcaccaacgcgctgaacggcaactgctcatcaaactgcaagcgcacggcactgacctgggtgaacagcccaacggtggagcggaaccgcgcattggaacggttgagaatcggcaaccccacgacccactcctggcgttgggcggtgcgggtgaaatacacatacagcgccgccagcagcacatgaaacgccgacgcctggtaacggttggccacctgttccatgcggttgagcagtgccaccggaaacgcctgcgccagggtattgctcgtggccttggccgtgtgtcgcggggtcaacagcggctcgggaatcagccggtacttgcccagccaataggcgcggtcgcgggcataacgggcggacgcgtggtagtgctggtctgcgtcgataaagtcgatgtaggacggcgccggcgactccgcttgccggccttgcaccagggcggtgtacagctgcgcgagggattgcagcatctggccgaagccccagccgtcgaggatcaggtggtgggcctgggtgccgaggcgatagtggtcgtcgtcgagcttgaccaggaaaaagcggaacagcggcgcgccctgcatcgcataaggccgggccatttgcgcctgcatcagggcgtggctcgcggcctgcggatcagcacaagctgacacgtcatgccgcgccagttccacagccaacgtcgcagcgaaagtctggcgaggcaggccgtcggcgtcgctgtgcagttgggtgcgcaacgcgtcgtgcctggcgaccagaagttcgacagcgcgctgcatcaggccggggtcgatggcgccggcaaagtccacataaccaccgatgttgtacagcggcgagtcgcctgcgcgcagttggtcgagccagatgtcctgctgggcggcggtgagggggaagctgggtgaatgcttcataagatccttctcatggaggtcaggcactggccgcgcaggggtgcccattacgacgaatgggccggattggagcatgggggccaggggctgtctgtcaccctaaacccggacattcaaatggatagaccaggcttggctgatggttcactgctgaaacgattaaagagttgtaggacattggctatatttggccgatgccggtttgaattgaacatttcaaaaaatatatttttatcttatttatcatagagttaattaaccctaaaaaatccgcttggtgactcgtagtcggaattacctctcagaaacgtcgaattaatgacgcggtttctatggcaggttgtgtccctcgtttccgctacatacgtaggacaaatccactggctaaatacactttcgaataccgactctggtgtgtgagcaacggatcgcccccgcagaggcccagagcgtctgtacacggttttcgatatcaaggatgagaaggctatgagtttgaccagcagtattgccaacacccaaagcccgcatttctacgctgaaatgggcgagttgattgccagcagtggccacccgggctttgccgcccacatgctgcacctggtggacaagtgggtgccgatccacctggtggatctgagcgaatggaccctcgacgagctgcgcgaccgtgtgctcgatatcacgctgctgggcagcgccggccagacgcaggacctgccgcctctggccctgaattccatggacgaccacccgctgctgcgtgagatgctcggcatgcaggacccgctgctcatacagttgaaggccaaggccaacagcgctcacccgcgcggcacctcgcaccagtgcaacctggtgtcgcgccagggcaaccggcgctgtgtgatttcgttttatcgcccgccgacccagcgcgggttttccctggccgagttgtcgtttctcaagtgcctgtcggacacgctgctgccgctgatcgagtgccacgcccagagcctgcgccaggcaccgcacaccgaggtcgaaccggcccacacgttgctggagcagtcgcaattgcaacgtgagttctacaaacgcctgtccctgggcgacatcacgttgtcggcgcgcgagcaggaggtgtgcctcggcttgctgaccggtggcaccgtgccgcagatcgcggagaaactcagcgtgaagaacagctccatcgagacctacctcaagcgcgccgccgccaagttgggcgtgagtggccggcacggtctggccaagtggatggtgggcgcctgatgcataaattgagcaccttcgcgatggcctggatgctcggcggctgctcgctgatcccggactaccaacggcctgcggcgcccgtgcctgcgcagtatccccaggctggcgtgtatgcgctggcgcaggccggcacgtcggactggcagcagctgttccacgacccggcgctgcaagggttgattggcgatgcgctggtcaataaccgcgacttgcgcgtggccgcgctgaacgtcgaggcgttccaggcgcagtaccgtatccagcgtgccgacctgttcccggccgtgtcggcgaccggcgccgggcagcgccggcgtgtgccgggcgacgtgaccggcacgggcaaggccgccatcacctccagctattccgcgaccctgggcatcagcgcctacgagctggacctgttcggccgcatccgcagcctcagcgaacaggccatgctcacctacctgggcaccgaagaggcgcggcgcactgcacagctgagcctggtcgccaacgtcgccaatgcctacctgacctggcgcgccgaccaggaactgctggccctggcccggcaaaccctggtggccaacgaacacagcctgcgcctcaccggccgcagtaaaaccgccggcaaagcctcggcgctggacgtggtgcaagccaccaccagcgtcgaaagcacccgcgccagcgtggcccgctatgagcgccaggtcgcccaggacctcaacaacctcgccctgctggtaggcggtccggtggacgaacagctgccgtcgcgtccacttgccgccgacctggtggcgcgcgtaccggccggcctgccctcggacttgctgcaacgccgcccggatatcctccaggccgaataccagttgcgcgccgccaacgccaatatcggtgcggcccgcgcagcgtttttcccgtcggtgagcctgaccgccaacgccggcagcgccagcaccgaactgtcggggctgttcaagggcggctcgggcagttggacgttccagccgcagatcaacctgccgatcttcaacgccggcagcctgcgcgccagccttgactacgccaaactgcaaaaagacatcagcgtggcgcagtacgaaaaatccatccagaccgccttccaggaagttgccgatggtctggcggcgcggcaaacctataccgaccagttgcaggcgcagcgggatttcgtcgcggccaaccagcagtattacaacctggccgagcatcgctaccgcagtggcgtcgacagcaacctcaccttcctggatgcgcagcgtgcgttgttcagttcgcaacaagcgttgatcgtcgaccgcctggcgcaactggtggcggaggtgaagttgtacacggcgctgggcggcgcgtggaacgtcagtgcaagcccgactgccgcagccgatactcccccggcgtcacctgcgcataccgaaggaaaaaccggctgaaatacgccgggtccttgaagcccaactggtagcagatttcgttggcggaactgccggtgaacagcaacaagcgcttggcttcctgcatcacacgttccaggatcaggcgcttggacggcaggtcggccaggcgccggcacacctcattgaggcgcgcctcggtcacgccaatcccctcggcatagcgcgacagcggccagtgctccagatagtgggcctcgatcaattcgttgaagcgatggaagatgcgcaggtcttcgtgccgggtcgggcgcgccggcagtgagtgggcgcacaggcgcagcaggcgaatcatgatcaggcgcgtgaggctgtccaatgcggcggcgcgccctgcccgcgcggcgttgatctcatcgttgagttcttcgaacagttgatccaggccgtggtcacccgccgtcagcgccacgcaggccgcgccggaagccaggctggggtcggcgtcgatcagtccccacaccaactgctggcgcaccgtcagcacatgcccatcggcatccgcctcggtgacaaaggcgtggggcaccgtgggcggcgtgaggaagaacatcggcccggactccacgaactggcggtcatccaggtacacccgcaccgcgccgctcttcacgtaatgcacctggaaaaaccggtcatgccgatgcacgggcatgttgcgcccgaaaaatcccgccaggttgccgagcttgtcgtaatgcacctcggcatcgctgtaacgctggtcgtagacctgcccgatgttgatgttggggatcggcttcacggtgccctcttcttgttgttatgacgccagaggattttgccacgcttgacggtagttaacatattaattataacgttaacacattaacgaactgcctatgcagcagtcgccaccgccaggagaaacgcatgagccgtaccctgcatgatgttgccagcggcaccctgttcggcgtcgcgctgaactaccagggcctgctggaccagcatctcgccgccttccagcaggcgccctaccagaagccgccgagcaagccggtgctgtttatcaagaccccgaatacgcgcaacgagcacgctggcgtggtgctgcaccccgagggtgaacgcctgcaacccggccccgcgttaggcgtggtaatcggccagcgcgccagtcgtgtcagcctggaaaacgccatggcccatgtggccggctatgtggtggtgaatgaattcagcctgccggaagacagctactaccgcccggccatcaaagccaaatgccgcgatggtttttgcgtcctcgggccacagttagtcccacgggaccagctcgccaaccccggtcaactgagcctcaagatgtgggtcaacggcgaactgcgccaggaaaacaccacggccaattgggtgcgcgatatcccgcaactgatcgccgaaatcagcgaattcatgaccctgcatcccggcgatgtgttgatcaccggcacccccgaagggcgcgtcgatgtgctgccgggcgacagggtagaagtcgagatcagcggcgtgggccgtctgctcaatcacattcaagcggagaccccagcatgaaacacgcccgtatccgctttgaaggtgaagtgcacgccgtacaggtgcaagccgacaacaccgtgcgtttgagcgatggtcgcctgctcgtcgaagaccaggtgcagtggctgccaccggccaccggcaacatgttcgccctgggcttgaactacgccgaccatgcggccgaactggccttcaccccacccaccgaacccctggccttcatcaagtccgtcggcacctacaccggccaccgccaggtcacctggcgcccggacaacgtcgcctacatgcattacgagtgcgagttggtggcggtgatcggcaaggccgcgcgcaacgtcaagcgcgccgacgccctggcctacctgtccggctacacggtgtgcaacgactacgcgatccgcgactacctggaaaactactaccgccccaacctgcgcgtgaaaaaccgcgacgccaccaccccggtcggcccgtggatcgttgatgtggccgatgtgcccgaccccggcaacctgaccctgcgcacctgggtcaacggtgagctgcgtcaggaaggcagcacccgcgacatgatcttcgacatcccctacctcatcgaatacctgtccagtttcatgaccctgcaacccggcgacatgatcgccaccggcacgcccgaaggcctggccgatgtggtgcccggcgatgaagtggtggtggaagtcgaaggcgtgggccgtctggtcaaccgaattgtcagcgaggcggagtttttctccgcccggaaagaggcgtgagcagcatgatcaaacactggatcaacggccgtgaggtcgaaagcaaagacaccttcatcaactacaacccggccaccggcgaggcgattggcgaagtcgccagcggcggtgccgaggaagtggcccaggccgtagcggccgccaaagacgcgttcccgaagtgggccagcaccccggccaaggaacgcgcacgcctgatgcgcaagctcggcgaactgatcgaacagaacgtgccgcacctggccgaactggagaccctggacaccggcctgccgatccaccagaccaagaatgtgttgattccccgggcgtcgcacaactttgatttcttcgcagaagtctgcacgcgcatggatggccacagctacccggtggacgaccagatgctcaactacaccctctaccagccggtgggcgtgtgcgggctggtgtcaccgtggaatgtgccgttcatgaccgccacctggaagaccgcgccgtgcctggccttgggtaatacggcggtgttgaagatgtcggaactgtcgccgctgaccgccaatgaactggggcgcctggcggtggaagccgggattcccaacggtgtgctcaacgtgatccagggctatggcgccacggccggtgacgcgctggtgcggcacccggatgtgcgcgccatttcgtttaccggcggcaccgccaccggcaagaagatcatgcagaccgccggcctgaaaaagtactccatggaactgggcggcaagtcgccggtgctgatctttgaagatgccgagcttgagcgcgccctcgatgcggcgctgttcaccatcttctccctgaatggcgaacgttgcaccgccggcagccgcatctttatccaggaaagtgtctacccgcagtttgtcgccgagttcgccgcccgcgccaagcgcttgatcgtcggtgacccgcaggatccgaagacccaggtcggctcgatgatcacccaggcgcattacggcaaggtcactggctacatcaagatcggcatcgaggaaggcgccaccctgctcgccggtggtctggaacgcccggccaacctgccggcgcacctgagcaaaggccagttcatccagccgaccgtgtttgccgatgtgaacaacaagatgcgcatcgcccaggaagaaatcttcggcccggtggtgtgcctgatccccttcaaggacgaagccgaggccctgcaactggccaacgacaccgagtacggcctggcctcctacatctggacccaggacatcggcaaggcccatcgcctggcgcgcgggatcgaagccggcatggtatttatcaacagccagaacgtgcgcgacctgcgccagccgtttggcggggtgaaaggttccggcaccgggcgtgaaggcggccagtacagcttcgaagtgtttgccgagatcaagaacgtgtgcatttccatgggcagccatcacattccgcgttggggtgtttaacccccgccaaggcgctccaacaacaataatgaacctggagaatcatcatgggcgaagtggtcctggcagcgaagatctgccacgtgccgtcgatgtacctgtcggaactgcccggcaagcatcacggctgtcgcgaagcggcgattgccggtcacaaggagatcggccgccgcgcccgcgaactgggcgccgacacggcagtggtgttcgacgtgcactggctggtcaacagcggttaccacgtcaattgcggcgagcggttccagggcacctacaccagcaacgagctgccgcacttcatcaagaacatggagtacgcctaccccggttgtcccgagctgggcgcgttgatcgccgccgaggccaacctggccggcgtgcgcagcatggcccacaacatcccgagcctggagctggaatacggcaccctggtgcccatgcgctacatgcacatggacgtgccggaggctgagacattcaaggtcatttccatcgccgcctggtgcgcctggcaccgcctggaagacagcttcgcattcggtgccgccgtgcgccgggccatcgagaagagtgaccgcaaggtactggtgctggcctcgggctcgctgtcgcaccgcttttcggacgaccgccaggccgaggcgaatatccacacctggacccgcgaattcgacaagcaagtggacctgcacgtggtggagatgtggaagcaaggccgcttcaaggagttctgcgcgatgctgccggactacgccgagcactgcttcggcgaaggcaagatgcacgacaccgcgatgctcctggggctactcggcgggccggattacgccaagccggcggagatcatcacaccgccgttcggcagttcgggcaccggccagatcaatgcgattttccccctgtagaaccgggagcaacccatgccgcactttatcgccgagtacaccgacaacctcgaaccacaggccgacctgcccggcctgtttgaaaagatccaccgcgtgctgggcgacagtggcgtgttccccctcggcggtattcgcagccgtggcgtacgcctggacacctggcgcatggccgatggcaagcacgactacgcctttgtacacatgaccctcaaggtcggccatggccgcgacctggccacgcgccaggcggtggccgaagcggtgttcgcggtgatcaacgcgcactttgccgagttgcaggcgcaacgtttgctggcgctgtcattcgagatggtcgagctgcatccgcaactcaatttcaaacagaacaatgtgcatgcgttcctgaataacccggcggggtaaacccgctgttctccccacggcctctcagacaaaaagtacaacatcatgagcacagcccactccaccgccagccgcgtgctggccgagcacgaccgtacccatcgttcagtgacgtggcgcctgatgccgctgttgctggtgtgttacctgttcgcccacctggaccgcatcaacatcggcttcgccaagatgcagatgagcagcgacctgcagttcagcgacacggtctatggcttcggcgctgggctgtttttcatcgcctatgcgctgttcggggtgccgagcaacatggccctggaccgcgtcggccccaggcgctggatcgccagcctgatggtggtgtggggcctgttgtccactggcatgttgtgggtggagagcgcccgtggtttctacgtgctgcgctttttgctgggggtggccgaggccgggtttttcccggggatcctggtgtttctcaaccgctggtacccggcacgccgtcgcggccaggtcaccgcgttatttgccatcgccgtgcccatggcaggggtgttgggcgggccgttgtccggggcgatcctggaacacttccacgatgtcggcggaatgcgtggctggcagtggatgttcctgatcgaaggcctgcccgtggtgctgctggggctggtggtgctcaagtggttgccggacggcttcgacgcggtgcactggctgaccgccgagcaaaaacaccagttgcgcgaccaactgcgcagcgaggaacagcgcaagaccatcacctcgttcggcggcatcctgcgcgacccgcaggtatggctgctggtggcggtgtatttcgcggtgatgctggcggtgaacacccttgcgttctggatgcccacgctgatccatggcgccggcatcggccgcgacagccaggtcggcctgctcagtgccgtgccgtacctggccggatgtttcttcatgatcggctgcgggcgttcctccgaccgccatcgcgaacgccgctggcacctgtgcgtgccactgctgatggcggcggtcgggatcgccgtggcgggcctggcgccgggcaatccgctgctggtgatgggcgggctggtgctggccggcatgggcgccagtgccgccctgccgatgttctggcaactgccgccggcgtatctgtccaccaccacccaggccgccggcatcgccatgatcagctcgttcggcagcgttgccgcgttcctcgcgccgtacctgatcggctggatgcgcgacgccacccagagcgccagcctggcgctgtacgtactcgccttgttcatcgccctcggcggcctgctggtgctgcgcacccacgccgccatcgtcaacccacattaaggaccgttgccatgctcaccccccagcaaattctccaggccgctgcgcacctggaccgcgccgaacgcagccgcgaacaggtgcgccagttttccctcgactaccccggcatcaccctcgacgacgcctacgccatccagcgcgcctgggtcgcgcaaaagatcaaggacgggcgcaccctgaagggccacaagatcggcctcacatcgcgggccatgcaggtctcgtcgaacatcaccgagccggactacggcgccctgctcgatgacatgtttttcgacgaaggcagcgacattcccttcgaacgcttcatcgtgccgcgagtggaagtggagctggcgtttatcctcggcaaaccgctcaagggccccaactgcacggtgttcgatgtgctcgacgccaccgagtgggtgatcccggcgctggagatcatcgacgcgcgcatccagcaggtcgacccgcagaccaacgcgacgcgcaaggtgttcgacaccatctccgacaacgccgccaatgctggcgtggtgctgggcggccgtgccgtgcggccgaccgagatcgacctgcgcaaggtgccggcggtgctgtaccgcaatggcgtgatcgaagagtccggcgtgtcggccgccgtgctcaaccacccggccaagggcgtggcctggctggcgaacaaactggcaccctatgacgtgaccctgctgccggggcaagtgatcctcggcggctccttcacccgcccggtcgcggcccgccctggcgacacgttccatgtcgactacgacctgcttgggtcgattgcctgccgcttcgtctgaaccctggaggattgccatggacctgcccatcaaccgcttcaaacaccgcctgcacagcggcgaggtgcagatcggcctgtggctcggcctggccgacgcctattgcgcagagttggccgccaatgccggtttcgactggctgctgatcgacggcgaacacgcgcccaatcacctgcaaggcatgctcggccagttgcaggccatcgcgccctaccccagccaggcgctgatccgcccggtaatcggcgacagtgcattgatcaagcaactgctggatatcggcgcccagacgctgctggtgcccatggtcgaaagcgccgcccaggcgcgtgagctggtgcgagcgatgcggtatccgccccagggcattcgcggtgtcggcagtgccctggcgcgggcgtcgcgctggaacagcattgccggttacctcgaccaggcggatgaacagatgtgtctgctggtgcagatcgaaaaccttgagggcctggcgaacctggacaagattgccgccgtcgagggcgtggacggtgtgtttatcggcccggcggatttgagtgcatcgatggggcatcgggggaatccggggcatccggatgtgcaggcggcgattgaggatgcgatcaagcgcatcgtgcagtcgggcaaggcggcggggattctcagcgcggatgaaaacctggcgcggcgctacattgagttgggcgcgacctttgtcgcggtgggagtggataccactgtgttgatgcgtgggttgcaggcgctggcaggcacattcaaaggcattcccgaggctgaccacagcggtggaatctactgaaatctcatgtgggagcgggcttgctcgcgaatgcagtggtacagccagcccattctctgactgacccaccgcattcgcgagcaagcccgctcccacattttgatcctcagtgttcgaggcgttgattcaacgcttgatattgatgttcttcaagtcatccagcagacccagcagggtctgcaacttctcttcgccaaactgatcctgcaaccgctggtagttggcctccatgcactggctcatcgactcgaaactcgccttgcccttgtcagccaacgtcaccagtacccggcgctggtcctgctcggccttgcgccggtgcaccatgccggcggtttccatgcgcaccagcacgccggtcatgctcggcttgaggatgcaggccagttccgccaattggtaaatctccagttcaccgtactgttcgaggatgcggatgatccgccattgctgttcggtcaggccgtgttcattcagggacgggcggaaaaaactcatggcggcttcgcgggcttgcagcaaggccagggtcagggattgtcgaggtttggacatagggatcagggtcacgaagtatttagttaataatttaacgaaactctaacattccctgccggcgagcgcgctataacttgtcgagtgcaccgcccatggcgcgctgaatcaaatgcatgggcacgcagggtcaagacttccatctcgccagggcccctaatggaggtatccgctttagagccttccttcacttttcaggctgcgccatgatcaacatcgaaacccccacgtattacaccgccaccaagaaatacaacttgagctttcccaccctggaacaggacatcgacgccgatgtggtggtgatcggcggcggtttttccggcatcaacacggccctggaactggcggaaaaaggcatcaccaatatcgtggtgcttgaagcgcgctacctgggtttcggcggcaccggtcgcaacggcgggcagatcatggcgggcatcggccatgacctggagaagatcaagaaggacgtgggcgaagacggcctgcgccaggtgttcgagatcagcgacctgggcgcggacatcatcaagaaccgcatcgccaagtacaacatcgacgcggacttctgccacggctacggctacatgggcttcaacgcccgccaggaaaaaaccctgcgcgcctgggaaaaggacttcaagtcgatcaacagccagcacgaaatccgctttctcggcggcgcggatgtgcaacagatcatcggttccaaggcctacagcagcgccctgctgcacatgggcggcgggcatgtgcactcgctcaacctgctgctgggcgaagccaccgcactggccggccatggcgtgcggattttcgagaacagcccggcgctggaagtcagctacggcgaacgcatcaccgtgcgcaccggccgtggctcggtacgcgccagcaaactgctgtgggcctgcgacagtttcctcaacaagctggagccggagctgcaccgttcgaccatcaacacctacgcgttccagatgatgaccgagccgttgtccgaggagctgatccagcgcatcagcccgattcggggggcctacagcgacattcgcccggtgatcgactactaccgggtgaccaacgaaaaccgcctgctgttcggcgccgcaacgccgttggtggagcatattcccggcgacctcaaggcctggaaccgtcacctcatgctgaagatcttcccctacctcaaggacgtgaaaatcgacctggcctggggcggcccgatggcgtgcagccccaacctgttcccgcagatcggcaccttgccggggcgcagcaacgcgtttttcgtgcagggctattccggttttggcgtgaccccgagccacatcatctgcaaggtcctggccgaaggcatgagcgaaggctcggcgcgctacgacctggtcagctcgattcatcgcccgaccatcatcggcaaggacgcgatccgccccttgctgctgacggcgggcaaatcctggcaccagctttccggctattggaacgggcgccgctaaccgcattttttactcaactggagaactgccatgcccctcacccccctcaagcacaacgtccaactctcggaactcgaaccttggggcaccgtggccgacctcggctccgagatcctcgaaggtgacgtgcgcgccttcggcaagatgacgttcggcgcgcccaccgacccggtcagcagcgcttatttcggtaccacccagggcaagttccgcatggtttatccgtttgctgaacaagccacggtggtcactggggaagtgctgctgaccgacgaatccacgggccacacctcgcgctacaaagccggtgacagctggttcgtgaccaaaggcacgcccgtgctgtgggaagtgctcagcgaaagcttcgtcaaacattacttcgccgtcgtgtaagggaggggttgccatgacgagttctcccgactggattaccgtcggcgcactggccgacggtttcgctccagacgccttcatcctgcccaacctggccgagctggcgggccaggcgttcaccctgcatttcgccaatggctggcagatcgagcaccgtttcgagcagcaccgcctggcctggcacgccgccgatggccactccagcggcagcgcaccgtaccgcgccacctcgattcgcccgggcctgtacctggtggatttcatcaagcacgaggccgggcatagctggtcgatcagcctggtgctggacacaccaaacgcctcgttcactgccgtgatcgggcgcctgccggaccaggccgagacccacgaaggcctctaccaccgtgccctggccggcaagccgctaacctcggtggaagtcgacttcctccacggcagcctcgaccgcccgtggcaggccggccactgccggcatgcgcccaccgaggaactggtgggcctgcgcaaccaataccgctacagccccagcgaggtctacgagcacatctacctcaacgagcggttctatgcctggcaatgcctcaaaggcgtggagcaaggcctgtgcgacaccgaccgctgtcactactacaagatcgccgaacagctgtacctgttcgtgtggcaggagaagatcgtgccgaccctcggcctggtgctgatcgacctgcagcagcaccgcagcgacggcaagatcttcggctatgccggtgcgtctttcgatgcgctgtcgaatttccccatcagctcgtattgccaggtgctcaaccgcacggagtatcccgatgactgagccgcgcacggtctaaatgtgggagggggcttgcccccgatagcnnnnnnnnnnnnnnnnnnnnnnnnnnnnnnnnnnngctatcgggggcaagccccctcccacatttgatctcctttgttttgaagatcccgtttatgcccccaccgcctgcatccggcttgaacggaaatccttcggcgacacctcgaactgcttcttgaacgaccggctgaagtgcgccgagtcggtaaagccccacttgtaggcaatcgaggtgatcgactcgctgcgcaggcacgggttggtcaagtcatctgcgctgcgcttgagccgcgcgcgctggatgtagcggcacacgctatcgtcctgttcttcgaacagacggtacaggtggcgcaccgagatattcagccggttggccaggccgatcgggctgagccccggctggctcagggattcatcgatgaccttctgcacgtagctgcgcaggttgctgccctgcagcgctgccaggccgtcgcggcactcttcgccctgctccagggccgatcccagcagcgacacgaaagccatctgcaacgcctccacttcacccgcgccgtctgcggtggcgtccttgcacagttgatccatcagcacatgcagcatgcgcccgcaggctttggtcgaggagatcttgccgaaagcccgtgcgtcgccgcccaggtgcttgcacacctgcggccgcgagagtgacagcgaggcgtgttcgatcaggccgaagggggtgatttcgatggagcccaccgagtccatcaacagcatctcgccaggcgccagttgcagggtctggccgttctgcgcgatctgcgaatagccgctgcgttggctgaccaggaaacagtcctggtcgttgtcatggtcggcgtggtgcgccgggcgtttgatcagcccggcattggtgcgcaggatggccacgccgcgcggcaagtctcggatctcgccgatgaacagcgagtggttgaacgccagttccgtctcgaaataaccgcacgcggcgcgtagctcgcggttccaagtgtccagcccgtcgtgtgcatgctgtgggatgctcatggggtgtctccgcaatggcttctttttgttgttctgatgcaatagttaacatgttatctatatgcacgcaacaacaacctgtgtgcccattgcgcaagcactaatgatgccaatcagaggttcgacaacacccgattcaacccgaccagcgccgcgagcaaatgactgcgctgcaccgcgctcagggcgatataacgccgaaacgccggcaggcgattgaccacctcgctgccgcccatatgctccaggcgcacgcaccattgctggtcgtgcagctcgatgcgcagacgcttgaaatccagcggcatcagcgcctggaacaacgcctcatcggccaacaagcgtgcctgcaactcacggcccaatgcctggttgccggcacggcgctgcacacgaattccatggcgccggatcgcgccgccatggtgcaccgcgaaactcgccgtgccgcccgtcgcagtcggtacgcgcaggacaaactcggtcagcaccaggtgcatcaacaactgcgactcggtgcgctcgacaatctcgaacgccacgccgtccacttcaagcgttgccagcccaaggttgcgccgcaggtgcgccagggtcacccccggtcgataccccgacggtgcacgatcggcacgccacagctcaaacagtctttgccgcaaagtcgccataaccgtcatcagcctgctccggttggttactgaactcctttgccaatacctcctccacagaggccggcttgaaggggttgaccttctgcaccaccagggtccagaacagtgcatacgccgccgtaccggccagcatcacgccaaacggcacatagatgtccgccggggtcatgcccggtggcgtgatgaaccacatgcccagcaggatgccgatgctcgacacgatctgcggcagcgggaaccacggcgagcgataggcccgtggcaagtccggccgccgaatacgcaggctcaccaccgagatcgtcaccagcaggtaggcaaagctccacgcacacaccgctgccagcaccaggtgcatgatgttgtcggtgttgccacccaggtacagcgcgtgaaggcagggaatcagcatcgccaccaagatgcacagcagcggcgtcttgaaacgtgggtgcaggtaggtgaaaaccttgggcaacgccccgtccaccgccatgccgtagagaatccgtggcacgccggccatcaaggtattgatggtggccgcgccggcaaacagaaaaccgatgcccagacacagcgggccgatctgccccatcacctgctcggcgaacctggggatggccatgggcgtgtccagcaggtgcacgcccgaggcggcatcgagcaccacgttttccacctggcgtttcatcgccgcgccatagatgaacatgcaggtggccacacccatcagccccagcatcatcgcgcgcggcatcaccttggccgattggcgcaggtccggcgccagcggcgtgacgaactcgcaaccgacaaacatgaacatcgccatgcccaccagcgacagcacggtgatcaggtcggtgcccaccagcgactcaccgaaccagccttccaactgcacagcgggcgcggcgatcaagcccagtacgccaaacaccatcagggtggtccacatgccgaaggtgaggatgatttccgcccggccaaaagcactgacgccaaaggcgttcagcaccccaaagacgatcacgaaacccacgccgagcaaccatgacccacccgccgattccgccagggtgttcaagtgttcgaagttcaccagggccatgaccccggacaggatggtttcagcagtgccggcaaacacatgcacgatcaggtacgccgacaaggtgccggtgatcgcgaaaaaccgccccatgccgcaattgatgtagtcgtacaccgagccggtggtgggcaggatcgaggcggcctcggcaaaggtggtggcctgggccagcatcattaccacggcgatcagcatcgccagggcgaacgcactgccgccgatgccaaagcccatagtggcggtgaggatcaccgggctggccatgatcaggccaatggtgctggccaaggcggtggggaaacctaccgtaccccggttgaggtgcgcggtgagtcggtcgttgatcgacatggtggggtcctcgaagacggtttttttaatgtatcggtactctgcgccccactcgaattgatcgtcttgcccctgtctgccgccggttttgttgctccctgccacagcgggcggcgtggcggccagggtcaattgcctggcacgcagagaaaagactcaggcccccgccactcgccctaatgcgccctcactcttaaccaagctggggacaataacaatggagcacacactgaaaaatcgcggcctgcgccaggcggtcggcctggggattgcgctgctggtgggccaagcccaggcggtcgagctttacgccgatgccgacacccacgtcaccggcaacttccttgccgtgtacgggatgttcaacagcaagaagaactacgacgggcgcaacggcggttccacctggcgcgaggccttcatcaagtacggcctgagcgtcgaccagagcctgggccgctttggcggcgtgtatggcacggccaacctggtgagttccggcacctggggcgatggcgatgcctccggggtcaccacgggcaaggagcgcaccaccaagttcgacgaagcctttgccggctggcgctcgggcgagctgttcccggcgttgggcaaggacggcgtggacctgtcgttcggtcggcagatcatcatgctgggcgacggttttctcatcaacgacgacggccccaatctgggcaagggcgtgggtgacggcgagttcaaccgtggcggtgcctactacatcgccgcacgccatgccttcgacaagactgcggtgattcgcctcggcggcaaggacggcgtacatggcagcctgatgtggatcaagtccgacaaccccgcccaggccatgaccgaaatggccgccggcaccctggagtacagcgccgcgccgggcaccctggggctcacgtatattcatggaatcgatgtggacgagcgcttcgccagcgacgtgcagcgccagcgcaaaggcatgaacctgtacagcctgcgcggcgccggcaatgcaggtatcgacaacgcgcacttcgcctttgaactggcccgccagaaccgccgcgacagccagcagaacgccggctacgccgaagccggctacaccttcgccgacctgccctggtcgccggacttgacctaccgctacgcgcgctattcaaagaactgggacgcgatgttcgccggcttcaaccgcggctacggcacctgggtgcagggtgaagtggcgggcaactactccggcccctacaacaccaacacctccgtgcaacacgtggcgctcaaggtcaagccactggagaacctcatcctgggtgcgctgttcttcgactacaccaccgtcagcacccgcggccagccgaatctggacggtcgcgagctggacctgtacgccgagtgggcggtgaacgagcacctgatcatcacgccgctgctgggcctctacaaacccgacaaggatgccgaaaccggcggcaaccaggtcggtggcaacggcaccaatgtctacagtcagttggtggtcgccgtaccgttctgaaccgtctcgggcgcgcagggacgcagcgcctggacctcggcataagcgccctggtgatacaacagcggcgcacgcccgaaatcgtcgaaggccaccaccttgccgatcatgatccagtggtcgccaccgtccacctgctggtatttctcacagtggaagcgtgccgagcaatcggcgaacaccggtgaaccgccctcccccggttcgtactcgatcagcgcgaagcggtcttcgcgtgggcgcgcaaagttgttggacaggtgcacctgatccgccgccagcacatttaccgcaaagtggctggcctcctcgaacacttcgtggctgttggagcgtttgtcgatactccacagcaccagcggtgggtcgagggacaccgagttgaaactgttggcggtcacgcccaccttgcgcccggacgcggtagcggcggtgaccacggtcacgccagtggcgaagttgcccagggcacgacgaaaggcccgtgggtcgaaaaggctgttgtcaggcatgcaagactcccgggcgccctcgaacggacgccctgattgttgtagtggaagaacgggtcacaccatgctcgggtccggctccaggcccatcagctcacggccgaggatctgcgcgcagacgtcgtagtcggtgtaggcatgggcgccggtcatatgcgaatcgcggaacaggcgctgcatttcgttgtgttcgaaccaggcattgccaccggctgcggcgaacaggcggtccaccgcctcgatgcacatcttggtggcgtaggcctggttggtgcgccagaacgccagggtttcgcggctcgggtaacgctgggcggcgctgtgttcggcgtggtcctgccaggttttttcgaggaatgcgcgggcagcggccacctggtgggtggactcggccaggcgcatcaacgccggcgttgccgcgcccacggcagcaccagtgtaggcgcgcacgcgggttctggttttttcgcggaacacctccagcatgcgctcggccacgcccaggctgacggtggaaaaaccactggcgaaatacggccggtatggcgcgtagaaaatctggctgtcggggtagaggccaaaacctgcggacttgccctgcatcatgtccctggccttctggatccggtgctcgggcacccaggcattgtcgatgaccagagtcttggtgccgctgcctttcatgccggcggcgaaccagtcatcgcggatctggtagtcactgcgcggcagcacggcaaagcagtaatcctgggtgccttcggcattctgtcgacggcagccgacaatcgcccattcgccgtgatcacagccgctgctccagcccatttcaccgctgaagtgcacaccgccttcgccctccaccacgcgcccgaacggcgcaatactgctgctggcggtggcatccgggttttcgccccagatttcctgctgcaaccgggccgaaaacagcgccagttggtggctgtgggtgcacagcaagctcatggcccaggcggtactggcacagctgccggcgagcaaggcgatgcagtcggcgaactcgggcagcgacagttccaggccaccaaaggccttgggttgaaaggcacggtgcaggccgatgcttttgagcaaggcgatgttctcatccggcacctggcgttgctgttcggcacgcgtggcattcgccgcgatcagcggcaggaggggcttgaggtcttcgaggagtgggtttggctttttcatggacggccccgcttattattggaagtccggcagccgctccaagtcgaggagcagcgctggatgcagggccagtatcgaacggcgcgggccggtggaaaatgcacgttccacaggcaagattgtacttttcacaggcgcggcagccacaggcatgacgcctggcaggcacagtcaagccagacgcgggtggcttgattaccctcggcttttcttttgtgaactgccaggaacctgccatgagtgatatcccgctgctgcctcacgtcgaagcgtttttacgtcgaccccatgggctgttcatcgacggcgtcaacgtccgcagccattccagccagacgctggcggtgaccaatccggccaccggtgaggtgatcgcccaggtcgccgatgccgacctggcggatatcgatgcagccgtcgactccgccaaccggggcttccagttgtggtcccaggctgcgccggcgacacgcggcaatgtgctgctcaagctcgccgacctgctggaacgcaaccgcgaagaactggcgcagatcgagacctgccagtccggcaagatcatccagattgcccgtgcgttcgaggtcgaccaggccgcgcatttcctgcgttactacgcaggctgggcgaccaagatcagcggccagacgctcaccccgtcgctgccctcgttcaatggcgaacgctacaccgcgttcaccctgcgcgaaccggtgggcgtggtggtgggcatcgtgccgtggaatttctcgaccatgatcgccatctggaaactcgcctcggcactggtgaccggctgcagcatcatcatcaagcccagcgaattcacgccgctgacgatcctgcgcatcgccgaactggccatcgaagccgggttgccagcgggtgtgctcaacgtgttgacgggcggcggccacgtcggcaaaggcctggtggaacaccccggcacgcacaaggtgtccttcaccggttcggtgcccaccggcatcgccgtaggccgcagtgccatgggcgccggcctcacccgcgcgaccctggaactgggcggcaagaacgccgccggcttcctgcgtgacgtggacgtggacaaggcggtggacggcatcatcgaagccggttttttgcattccgggcaaatctgcgcggcggccgaacgtttcttcgtgcaccgctcgcagatagacgcggtgctcgacaaactcagccagcgcctcagccgcctcaccatcggctcgccgctggacgaacgcaccgaattcggcccggtcacccaccatcagcatcaactcaaactgctcggctacttcagccaggcccgcgccgaaaacaaccggatcatccacggcggcaaactcatcgaccgccccggctgctacgtcgaacccacggtgatcctcgccaacagcatcaacgacaccctgctcaacgaagaaaccttcggcccgatcgcgaccttcctgccctacgacagtgaagacgagctgctcgcgctgatgaacaacggcccctacggcctcagcgccagcctgtggaccaatgacttgggcaaggccctgcgcatggtgccggcgatcaaggccggcacgttgtgggtgaacatgcacacactgctcgacccggcagtgccgtttgggggcaatcggtcttcgggggttgggcgggagtttggcagtgcattcatcgaggattacaccgagctcaagtcggtaatgattcggtactgagggtcagccctttcaaggtctttgaaaaaccggccatatctggctgataccctcccaatagggcggacactgcaactgtggcgagcgggcttgccccgcgttgggctgcgaagcagccccaaaaccaggcgccgaggattacctgacacaccgcacgcttccgaacctggggccgcttcgcgccccaacgcggggcaagcccgctcgccacagaaagcccactcaccacaagaggcccgcctgccgatccccctaattggatttacgcctgcgcaatcaccgcctccgcctcgatctcaatcaaccaatccggcaacgacaacccgctgacgataatccacgaagacggcggcgggttgtgcgggaagcgctcgcgcagcgcttgcgcgatcggctcctgctggtcacgggcggactcgacgatgtacagccgcaacatgatcacgtgagacaggtcaccgccggcctcggccagcaccttttcgatgttgtccaaagcggcggcggtctgttgcgcaatacccgggccgacggtgcgctcgtcagcatccacaccgacctggccggacagcatgatgcgccggccttgcggcacttccatggcctggctgaagccgtattgcagggcgttgaataccgttgtgggattaatgaccttccgttgcatgacacttccttgttgtttgtaggaaaacaaggctaacccaaagcaatcgttcaatccggcggttcaacatcccgcaacatatcggggatcgtcgaggggtgggacagactaccaactccccatcgccagactgaacggcgaaaactccgcgaactgccaccgcaacgccaacgccgccgggcgccgtacgacatgttccacggtgaccgtccacaagcgctgggcgccctcgaacagcgccacttcagggccatcgaggatcagtgaagtacgcccagccacctgcagcacatcccccgattcaaaatcgataaacaacaaccccgccaccgggttcacctgcaaattacccaaggtgttgaagaacaggttgccggcaaagtcagggatggtcagcacgttgccttcgacccgtacaaaacccgtattgccgccgcgatgggaaacgtccaccgagcgctggccatccacctcgacatagctggcgacgaagaaggtatcggcgttgcggattgccgcttgggccgcctcatccaggctgctggaacgttcggccacgctaccgggtttacgtgcgacggcatccatcggccgcagttgaatgtacttggggcaattgccgaacgtgtgcgccacgtcgaccgaaaagccctcgtgatcgagcacaccgatacgcccattcatacggttgcgacggcgggtgttgaggtcgatgcccagcaagccaatggatgcgccttcacgcaaggcattgcgggcagggtcgctcgcggatggcaagctatcaacctgcaaggtctgtgggtccggcgagtgggcaaagcccggcgcaccttcaagcatcgtcgcccagggaataccttgctcgtccaccacacccagcatcaggtacggcaacaaggggtagaaatcccgatgctgctcgggcaaatggtcacggatcaccttgggcccgaccacggccattcgctcggcgacgcccacagcttcttgcatgtgccgttcaccggcatgccagggggattgttcgatcaggttcatggcaagcacctcatgttggataacccgatgctgcgccctgcccgccaccgagggaatcaccacgccaggcaatccactgttacgccagctgaaatgccgggtgttcacgcagcgccgccacgcagtggtcgacaaagctgcgcacgcgcatcggtgcgttgcggccttggcgatacaccacgtgcacgggcaatggcggctgttcaaaacccggcaacaggcggcgcaattgtccattctgcagatgctcgtgaaccgggtaactcaggcagcgaatcacccccgcgccatgcaccgcggcattgatcgcgccctgcaccgtggcgcagccaaggcgcgcacgggccttgagttgataaccctggaaatcccaatgcacctgatcggcactggcaatcagccgatgctgcttgaggtcgtgcgggcgttggggctcgccatgaacagcgagatagtcggggctggcgcaaagaatattccgcacctgccccacgggccgggcgatcaatgatgagtcgggcagttcaccgacgaggatcgccacgtccagcccttcttcgtgcaggtttggataatagtcgtggtaatgcgccgcgaggctcacctcgggataacggtccaggtagtcggccaacaccggcgccatcacataacggctgaacaaaaagggcagaaacacccgcaggttgccctgggcctgcacatgcaagcctttggccgaggcttcggcggcgtccacggcggcgagcaggcgcacgcaatcggccaggtacgcgttgccggcgtctgtcaggttcacgccgcgcgtgctgcgctcaagcaaccgcacgcgtagccgcgcttccaggcgggcaaccgcacggaccagggttggtccggacacctgcacactgcgcgccgcgccggccaggctcgagtgcccggccagtgcggcgaacagttgcatgtcgcgatagcgctccatcaaccgcgccgtttcatcgccgggttcagggcggcgtcctggcccaggcgatggctgaggaagtcgacaaaggtgttgaccttggccggcacgcggccgcttttctggaacaccacctggatcggtaacggctcagcctcatacgcttgaaggacgatctccaactcgcccgccgccaccgccgtggcgacctgataggacagcacccgcgtcatgccccagcccaggcgtgccaggttgatcgcggcattgtttgccgtaacgaccaggcgcggctcgatgggcacggtcaagggttggccggcgtcgacaaactcccagccactcaccagttggctcgacgatgacgtgacgatcttggcctcacgcaactgcgacggatgctccggtcgcccgtgctggtcgagataggctggcgctgcacagacgacccggcgcacttcaccgaccttgatcgcctgctggcccggctcgtgcagatgaccgatacgcacggctacatcgacgccttcgtcgaccaggttgaccacgcggtcgaccagcaacgcattgatgttcaccaacggaaagcggtccaggtattcccccagcaccggcgccacatacaactcgccgaacagcaccggcgcggtgaccgtcaggtggccgcaggggatggagtaactgcccgccgccgcttcttcggcttcatcgagttccgccaggatgcgccggcaatcttccaggtaacgctggccggcttcggtcaggtgcaagctacgggtggtgcgcgccagcagttgggtaccgatgcgttcctccatggcggcaatggcccgcgtgacgctgggcggcgaggtgttcaggcggcgcgcggcggcggcaaagccctcctcctcggccaccgccaggaacacctgcatttcatgaaatcggtccatcggcactcctctcaagcaactgcatattgctattcccctgtggcgagcgagcttgcctcgcgttgggnnnnnnnnnnnnnnnnnnnnnnnnnnnnnnnnnnnnnnnnnnnnnnnnnnnnnnnnnnnnnnnnnnnnnnnnnnnncccaacgcgaggcaagctcgctcgccacaacaagggttcacgttaatgggattgcaagcccacggctgtgcgtggcatgccgacgaaccccggcaacgcttcaatgctggcaagccaggcgcgcacctgagggtagtcggccagcgacacattgccttcgggcgcatgggccacgtaggtgtagaacgcaatatcggcaatagaaggctgctcgccggccaggaaacggctctggctcagttgtgcctccaccagcttcaacagggcatgggaacgagcaatggcggcgacggtatcgacctcggcaccaaacacggtggcgagccgcgcggacgcaggcccggcgctcagttgaccggcggcagccgagagccagcgctgtacccgcgcctgtcccacaggatcgcccggcagccattggcccttgccgtaggtgttggccaggtaaaccagaatcgcattggagtcggccagcaccacaccgttgtcatcgatcgccggcacctggccgaagctgttgatcgtggccagatagtcggcggtcttgtgggcaccttgcttgaggtccaccaggttgtattccaccggcaagcccagcagggacagcatcagttccacgcggtgggagtggccggacaacggaaaaccatagagtttgatcatgaaaggctccaaaagaagggggtctcgacgccccgcatactccaccgctgccccggccgttggaatcaccaggatttacaatcgagcatttcatccgatgaaacaataccgctcagcgctcctcgagcctgtccctcaggaaccgatgactcaccgaaaacaaccgccgataggtcagcagcaccgcccccaccgtgcccaacgccgacgacgcggcaatcaggaacatgatcccgatctggtaccgcaccgcgtccaccgggctctcccccgccagcacctgcccggtcatcatgccgggcaggctgacgatgccgaccaccgtcatctggttcagcgtcgggatcatccccgcacgcaccgcctggcggatggcttcctgcgcggcctcccagcgtgaaccgccgagggccaggatcatttcgatggtgttgcgccccgaggtcagttcctgggtcatgcgttcgatgcccagggagacgccggtcaaggtgttgccgaggatcatgccgaggatcgggatcgcgtactgcggctcgtaccaggggtggatgcggatcaccgcaaacaagcccacggcggtgaccagccacgaactgccccacaccgacaggatgctgtcgacccgctggccccggtaagtctgccgcccacgcccggcagcggagaggcccgcgatcagggtcatggcgcacatcagcggcagcaccacgtaccagtaggcgaactcgaacacccagcccagcaggtaaccgatggccagcagttgcaccacggtgcgcaccgccgcccacagcaattggcggcccaggcccaggcgcaacagcagcgacagcgcgccattgatcaggatcagcgaggcggcaatgcccatgtccagcgcggtgaggttctggtaattcatggctgggacgctccgctcaacacaccggcactcatctgcaaatggaggtcactcatgcgccgggcctggtccaggtcatgggagacccagatgcaggcacgggtgcgatcactggcaaaccaggcgtcgatcagcgcttccacttcgcgggatgaggtgggatcgagggcggcggtgggttcatcgagcaacagcacttcggggttcagttgcagggtgcggatcagcgaaaccacctgggactcgccgcccgacaggtcggcggcgcgtttggccagaaagtccggcgtcttgccggcgtggcccagcagtgtggtcactgtcgccagatcgaagctgcgcttgcgcgaggtgttgaggctgaaggggaagcgcaggttgtcctccacggtgccgtcgagcagcgccgggcgttgggacaggtagctgatatggcagcggtagtggggaatctgcgcgttgccgatcggctggccgttccacaggacctgcccggaggtgggcgcatccagcagcgccagtgcgcgcaggaacacacttttgccggagccggatgagccggtgatcgacacgcggtcgccggcctgcaggctgaaatcggtgggctggagcaacggcacctggcggcgctcgtccaggcgcgtgagggcgcgggtttcgattaacggggtgtcggtcatgaactcattactcggttgaacggcttgcaatcaaaaacctcactgcctatattccctgcctggcgctctctacgccaccttccgcggaaagggctgcgcccaggacactgcaacatcctcttttttctacgactccccaccttgaagcggaaaaggtttgtgcaaggagatcgtatgtcccaacccttcaacaccgatggccgtctcaaccttgagcaacagcgcaagcgcgccaaggaactgctgccgcgcctcaaagcccaagacccgaacgctaccttgtcccaggcccaatgggaaatcgccaagcagctgggcttcagcagttggccaaagctcaaggcccatgtcgatgccatcgacttcgccacccgccaccccgattttgccgccagcgatgaagcccgcaccacccactggcgctgcggcaatgacattgcccacagcctgcaactggcggggttcaaaggtcagttccggatgctcaccgacccgctgtgcatggggccggtccgcaatctgccccgccaagccttccgcgccctgcgcagcgcttttatcagccaggcctttgccattgatgcagccgatgcagctcgtcgcgtcgacgccgaatacgaccacctcgaagcattggccagcgccgaccacagtgtgctgtggtgcgaagcggatgcctatgaccaactgttcctgatccgcgcactcgccggccttgaacaggtgccgcgcaaactggagctcatcgaggtggaccgcattcctggcgtgcagcgctttatcggcatcggccaactggcgccggatgtattggcgtggctgtggccgcagcggcgcttgatcggggatgatgcggtgcaattggccaaacaggcctggtcggcgtattgcgacagctcacccgtccaatgggcgcaactggcccacgacaaccaccccgccttgccgttgcttgccccggcgttgttgcgccaattacaggaactgcccggtctgcatgacggcctttcgttgaccgagcgcctggccctgacgtacctggccgagaacgggccaacgccgtttggtcgggtgtttgccgaactgatggccaagcgtgaaccgctgccgtttctgggcgacatgatgtttcatgcgctgttgcaaccgctgctcgatggcgacaagcctttactcacggccaccgagacgcacctggaatggccgcgccaggtgctggcgttgactgcgctggggcaagccgtgctgaacggtcacgccaactggctggatcacgccagccatgtgcgatgggtgggtggggtatgcctgcgacctcgccaaccccactgggcgattgatgagcacatcatgccggtctggcgcccgtgattacgctaacgtgctgcccattcaaccttcacttgcgagactgcccatgcgcaacctgatcttcgccagcctgcttctgctggcgggctgccaacaaacgccgccggccaatgaccaactcgatgccgtgctctggacccagacctctatcgagcatgagttgatttaccgacagcttttcgccaatgccacccgccaacttgacgtggcgttggccgatcccacctgggatgccctgccctttgcgccacgcaacctgaacgggttgccgccggcggtggtggtcgatatcgacgaaaccttgctggacaacgtgccgctcaacgcccgcgacgtggtcaacaaccaagtctattcctacgaccgctggaacacctgggtcgaccaggccaaggcccaggccttacccggtgccgtggcgttcctgcaagcggcccggcaaaaaggcatcaaggtctattacctgaccaaccgcgaacacagccaggtcgccgccacggtgaagaacctgcgcctgcgcggtttcccaatcgaaagcgacgaacaggtcctggccgccagcccccccaccggtcactgcgaaagcgccggctacggcaagaactgccgccgccaatgggtcgccgcccatgcccgcgtgttattgatggccggggattccctgggggatttcgtgcaggccgaccacaacaccctcgcggatcagcgcaaggcggtggagccctatatgcactggttgggccagcgctggttcttgttgcccaacccgacctatggcaactggtacagcgcgccgtatggggatgatgagaagttgccgttcgagcaaaagcgcaagctcaagcaacaggcgttgcagttgcaggagtaatccgccttggctggcccaccgtgcttgacgccatcggcccacatctgattgacacaacaaggtcatatggaaatgaaacgagtacttatcgcatcgctcggcgctctatcgctgctccaaccgtcattctcttcagcggatatcaccaacgggaaaaccctcttcacccagcggtgtgcgatgtgccatggcgccgatatcagaggtacaggccccctggccaacaagagcaatcccccgacacctgacctgaccaccgccacgttcaaaaaacgcctgaatgactacccaggcgttatcgtctcttcaatcatccttcgccccaatggcgacctgatcccgaggacgttgcgagagaacggcgtgaagctagcgccattcgcgtggagggttagcgacttccgcgatttgaatcaatacatgagcggtgtgattgccaagacgcgttgagtctcacagcgttcttgcagcgatcgcctccacttcaaccaacgcaccgggcaatggcaacgccaccacttgcaacgccgtacgcgccggtttattcggctgttccggtgtgccaaagaactgcgtataccccgcctgcaaaccggcgaagtccagcccgtcaccggcgaagtacacccggccgtggccgatgttggtcaccgaggtgccgctggtgtcggccttgaggaccacgttgatcaccccggcgatggcatccgagccgtattgggcggcgacaccgggctgctggtgagggtacgccgctcggggtaggctgttgagctcaaacataacggaatgggttttgaaaacatgatgctatttcggcataatataatattctttgatttaattatttattgattttgttattcatttaagtaatgtttttttgtgatctggggattgggggtatatccgttatttgggtaacggcggatattggttccgcccttacggcggctcacttttgaagagccggaatgccggcccagtcaaaagtaagcaaaacgctcttgccccaacactcggcacctcgcttaggctcggtgtgcccgtaatccgacagggatttgggggggcgcctaagatcaaaatcaaaagcagatcaaaagccagagccagagcaaaccacccttcaactgatacatgaagatcaaactgtgggagggggcttgcccccgatggcggtgtgtcagccaactcatcagtgactgacccactgcaatcgggggcaagc

SEQ ID NO: 88 - DNA, 308936 bp, Pseudomonas nodulensis
  misc_feature (164999)..(165073): n is a, c, g, or t
aatccggtcggctctaaggccgccgcgctcttgctcttgatctggggcgccccgtcaaacacgctggccgaacgcaggcttgaatccgtgggtaacccggcaggacgccgggttagccgccccgcgccatggatggcgcgtggcggcggcccacggattcaagccggagtgagggcacaccgagcctaagcgaggtgccgagtgttggggcgaaggccttttgcttacttttggctgggccggcttccggcctttccaaaagtgagccgctgtaagagcggaaccataagtagccgttaccgaagaaacggatatgtacacttacctacctacctacccggccgcaacaaccgcatctgctgccgataatcatccgtcacctgccgcgcctgcccactactggtaatcaccctgggcgtaatcaacacaatcaactccgtccgatccttggacttgctggtactcccaaacaaccagcgcaaccccgggatctttcccagatacggtacggcactgacactctccccgttgtcctgcttgatcaacccccccagcaacaccgtctgcccactctgcaccgccacctgcgtcgacaccgaacgcgtcgaaatacgcggattcaccggcgtatcgctggtaccactctggctctcggcatcactgacctgctgctggatatccatgtacaccaacccccccggattgatccgcggcaccacatccaggatcaccccggtctgcacatactcgacactgctcaaggtggtgtccgcatccccggtgttgacggtggtctggctgatgggaatgttgtcgcccacctgaatctgtgccggctggttgttcatcaccaccagcgacggcgccgacagcacctgggtgcgcccattggtttccagcgcatgcaacgccacctgcaggttcgagctgacaaacgaatagaacaacgaatccgtcgcccccagccccgccccaccaccgcccagcgcgccctggctgccggaggcattggccaccgtggtgctgccagaattgcccgccaggcggcccaagtaccactgcacccccaggtccagctcaccggtgagcttgacctcaagaatccgtgtctcgatctgcacttgcagcggtgggttgtcgaggcgcttgatcgccgcttcgatctctttccactgcgcaggacgggtgcgcaccaacagttggttgctgctcttttgcgcggtgatacgggtgccggcctccagggcgttggtggcagcgaccggctgctcttccggctcgggttcttcaacggcaggagggttgttctgcaagccaccggtattgagtgacgacagggtcgtcgtgcgcaaccccggcgcgaccttggccggcgtgtcgtccttgatcgcgccggtgccgtagatctgccgcaggtacttggccaggtcgacggccttcatgttgcgcacgtcgtagacgtacatctgtggctcgttgccgccgccctcgtcgatggtgcggatccagtcgccgacttcgctgaggtactggggctgggaagaaatcgccaccaccgagttggtccgttcaatcggcaggaagcgcagcatgcccgccaggggcatgccgctgtcagggccgaacaggctttgcaactgaggcatcagctcggccaccgacgcgcgttgcaggccgaacacacccaccgacatgcccttgagccagtcgacgtcgaaggtgtcaatggtgtcctggtagttggccagttcatccggcgtgccggccaggctcagcacattgcgcgccgggtcgaccagcagaaacgcgttctcgcgggcgaagggcttgagcagtttctgcatctcggtggcggagatgtagcgcagcggaaacagccgcgccgacaagccgctggaaggttgcgccacgctcatctgcggcaccagcttgcccgccaccgcctggctggctggcaggatcacgtagcggtcgccctgcttgatcattgcgttgtcggtccaggacagcagggtttcgaggatcgacaaggcctgctgcttgtccaccggcctggaggtggaaaagctgacgttgcccttcacaccctgggcgatgctgtagttctcgtgcaacaggtcgcccatcacgctgttgatcaccgcttcgatgggttggtcggcgaagttgaacacgatgtcgccgccctctgccttcgcacccggcgtggccgccggcgcacgcacgaactgttggttgccccggatcaactggcgctgcgcgggagacttgaccaagggctgggcaacttccgttgggggcgcctcgctgggtgggcgttgcgcgccggtgccctgcatggcctcgtgcagaagctcatcatccggttcgagacggtcgggaaagctgccacagccgcccagggcaagggcggtggccaggcataacgtggaggtgcgcatgtcgatcaagggaggggctcgcggggcaaagtaagggggggtcgcttggacggtggcggcaagcgcttggcgtagaagctcaaggtctgggtgcgaccgtccaggctgaaacgggcggattgcggagtgaggtgttccaggcgccagccgttgggcagggtctggcccaggcgcacggtcagcagcgggccgtcgacctgcttgagcatggccatctgcaggttgccggtgatcatgatgccgctgagggtgagatgggccaggctgctgacctgcgccttgcccaccacacgatccgggctgcgatccgggctgaacagcggcgcttgccacgtggcggccaggttgtccaacggcacactgggcagcccttttacttgaggagtgggatgggcgcgcacaggcgcttcgggcagccattgcggttcatcacccaggctgctgaggatcaccgccatcagcacgcccagcaaccccgacaggccgagcaagccccactccacggggcgcaaccggctcatcatggcgtcacccgcgacggttgcaggtagccgcgcaccagcaggtgcaccaccagcttgcccgcaccaccactggccggcgcctgctggctgcggcggatgcgcagctcatccacaaacaggaacggcggttggtattcgagctcatgcagcagcgcttccaggggctcgatggcgcaatcgagtgtgaggctgaccttgacctggcgatacggctcgccgtcgtcctgctccggggtgatgggcttgcgttggctcaggctgcacccgccgccgaggttggcgtggctgttgatcaggtcggcgaggcgttgcatcagatcggcggcgaccacatccgggtcgtcccccggcagcaggctggtgctgctggccgggtcctgccgcgcctgctcaagttgctggcgcaagccatcgcgttggcgcagtacaccggcatagcgttgttgttgctcgcgcagttgttcggcctgttcacccatgtcacgcaagggtccggcaaaccagctgtcgaccaacagccagtaagccgcgccgaccaccacggccagcagcaacaaggccgcgccgcgacggtcacggggtgtgaggggtcggcgcatcggcagcctcctggcgtaggtgggcgcgcagggcaaactggtccttgccggtgcgcgcatcgggttggatcaccccttcgaactgggcgttttccagactgcggcaacccttgatgcgagtgatcagcgcactggccttggcgctctggccggcgatggaaatctcgccgtccttcacgtccagttgatccagccaggtgtcggcgggcaggcaggtggtcaggtcgttgagcaacgctgccagtggcggttgcgccagtttgcgccgggtgaggtactgcgccgcgccgcgggtattgagcagttgctggcgcagcgcatgcacctcggcgacctcggctttttgctgttggacgctggcgtgcataacgtcgataacgcgctggcggtcgttgagccacagcagcatcgccgcgatcagcaacgccccgcacagccacggcaggctgcgttgcaagcccatgccggcgggccgctgcgggcgcaatggcgcgggcagcaggtcgacgccgaggtccgccgcatccacgcgatggggatgcaggcccagggtggcgcagtcggcgaggatctggtccaggcgttcgcgcaggatcgccaccaacgtcacctcaaggtgggtggaagtacgtcgctcctgacgcgccacaaagtagagttggtcggcctcgaacggggtgtagcggtccagctcgtagccgaccacggcgctgagattgcgccccgccgccaagggcagttgcacgctttgcaccagcacagcgtcggcgccgagcatcagcacctggcgcgtgttggccgctgcgaccggcgcgctcagtggccagtggtggatctgctcgggtggctcttgccacgccagccacgcgggtacacaggcgcgcaactccacgatccatgcgtgccacccctgttgcagcaggctgccgcgccagtgtcgggcgatgggttccagtcgattcattcttgccaacgcaacacccggtagggttgtgcgctgtcctccgatgggctcaataaaacggtgacttgcaggcgcgcctgataaccgccgggccgctcggcgcggctgtcgaccaccagtacctcgccggggtccacgccttcggcgttctggcgcggcaggttcagcgccttgcgcatcagcgggctggcgaaggcgggatcggggcggtccaggtcgctccacaaggtgatctcgggcagcaagcggctgtagagggtttgcgtcatgccgggcaattggcgtacttcttccagcacccgcaacggcgccaggccctggttacgtcgtgcttcgagggccgtggccagttgtgtggcctgggccggggtagcgccacaggccagggccaggcgcgtgaagtcctgggcatcagcgttgatcaggtagagcttgccgcgctcgctgcgcaggctcacgtgcaattgggcgtcgtcaaaggccagggggatgtcgcgaccatcggcaacccagtgccgatcggccatgacctgcgcgataccggcttcggcggccaacacggtctgggtgtgctggcgcagccacagggcctggcgactttccagctgtacccagccggccaggccgccgagcaacacgctgagcaacgccagtacccacagcaccagtagcaacgcagcaccacgttggcgcttcattcttcaacactcccgctggacaggttcaagcgcaaggcaatcacctgggtgacccagggcaccggccccgccacgctggcagcgatgcgcacggccgaaggcaagcgcctgggccagggccattcactcacccagccggtgggctggcccagcggtgactcgccgcgataactgaactgcaacgcctcgatgttgttcagcagcacctggggttcacgttgagaaaaccccacctgcaacgcctgttcgacccgttgcaggctgaaccgatggatcccgccaccaagcacaccaggcaaggtcgagacaaattccagacgctgcgccgtgcccacgaaaaaaccatcgccctcgcccaccgccagcggcaacgcctcgctgatcgccgtgcgcaaaaactgttgggcggcgcgcacttcatccaggctcaccgtgtacgcctgggccttggacacggcgcgattggcccccagcaatgcgccgccgaccagcaccagcaaaacgccgagcaagctgagcaccacaaggatctccagcaaagtgaaaccctgctcgcggcgcttcacaggcgcgccttcaaggtgctgaagcgggcctggtgcgagccttcgctgaggaccaggtcaagacgcacgatccgcgcttgctgccgggtgctgatcagttgccaatggatgccgtcgagttcgccctggctgacgccgttgctcaagcgccccgccgcttcctggtcgaaaatcgtcagcgccgcgtgggtcagccggtcactgtgggccacctgggacaacgagcgcgcactctggccaaaggcaaccagcagcaccgtgctgcacaccgccatcagcgtgagggcggcgagcatttccagcagggtgaaaccggcctggcgcttcatggcagcgccttggcttgcacgctgccggtgagccagccgatatcgatgcgccaacgccgggcaccattggccacgaggagattgccgccggtggaactgccgtcggggtagaactcgacaccagggccgacctgttcggcggtgtgcagcgtcacatgcaactcggacggccaccgttgcaccgctcgccccggcgcctggaacgtacggtcgctcagatcgaacacggtacgcgcaggctgcccactgacaatcgcccctgcccgcgtggtgcgcagcgcctccaccatctgccccaccgcatggcgttcctttgccacctgcaagccctggcgcacacccagccccagcacgctggcagccaggctgatcagcaggatcaccaccagcatttccagcagggtgaagccgcgctggagcatggcggccctactcccaattgcccaggtcggcactgtagccttcgccgcccggctggccgtcctggccatagaagatcaggtcgaacgcgccgtgttcgccaggaaagcgataaccgaaggcgtgcccgaacgggtccttgaggtccgacggcttggcatagccaccgggcctgtccaccagctgttgcaggctggtgggcggtgcgccgacgtcgagggcgtagctgtcgatcttcatgctcaggctggccaattgggccttgccggcgccgtacttgcccttgtccacattaccgccgacctggcgcacgacgatggtggcgacgatgcccagcagcacgatcaccgcgagcatttccaacagggtgaaaccgccttggcggcgtggttttttcatggggtcagctcctttatatattgctggtcaggctcgtcagcggcagcatgatcgccagcatgatcaccgccaccagcaccgccatgaccagggtcagggacggcaccagcgcggccagcaggcggtcgatgccgcgcttggcttcgacgtcgaagatgtcggcgaccttgagcaacatgccgtcgagttcgccggcctgttcgccgacttcaatcatttgcacggccagctcgggcagcagcggctggctgccaaacgcactggcgagggtgccgccggcttttaccgattccgccgcacgcccgacctgggcctgcaacgcatggttggtacagacttgccgcgcaatcaccaaggcctgcagcaacgccacgccattgctcagcagcgtgccgagggtacgggccaggcgtgccgcttcgacgcgttgcagcaacgggccgaccacacgaataccgagcagacgccggtcgtagcgctcgcgaaacagcggatcgcgcaggcgtgcggcccccaaccaaacgatcacgctcaacccggccaacagcgccaggccataggcgtcgagaaacgtcccgagggccaggatcacctcggtgatcagcggaatcggcacgcccaggtcctggaagatcggcacgaactgcggcaccacatacgccagcagcaacgccagggaacccagcacgcccaccaccaggaacgccgggtagatcagcgcattgatcacttcgccacgcagcaattggctgcgttccaggtaatcactgagttggcgcaacgtcccttccagcgcgccaccggcctcaccggcccgcaccatgctcaggtacaacgacgagaacgccggaccctcttcttccagcgcggcggacaacggcttgccggccttgacccggtcgcgcaggcgttcgatcaacgcgcgcacctggggtgggccgggctgcttgagcagcaggctcaacgagcgctcaagcggctgaccggcccccagcagcgtcgccaattgctgggtaaacctcaccaacgcctggcccttcaacggcccgcgtgccctgcgcaggccggggccgccggccggttcgatgtgcaacagcagccaaccgcgcttgtgcagggtcgccaccgcagcggtttgatcggtggcctccagcgtaccgttctgcggcgcgccctggctgtccagggcacggtagctgaacaggctcacgcgtcctctccacgggtcacgcgcagcacttcttccagcgaagtaatccccgccagtgcctggcgcaagccttcttcatacaaagtgcgcaaaccggcgcggcgtgcggcctgttccagggtcgaggcgtcggcgtggcgcatcagcaggctgcgcagttcgtcgttcatcaccagcagttcggtgagggcgctgcggccgtgatagtccccgcgatagagcaggatcgggcgttgttcggtgaggcggtccaggccgtgttcggcgatcagttcgggcggcgcttcgaaagcgacacgcgtggccgggtccaggcgccgcaccaggcgctgggcgaggatgccgctgacggtcgaggcaatcaggtagctttccacgcccatgtccagcagccgcgtgatgctggcggcggcgctgttggtgtgcagggtggaaagcactaggtgcccggtgagggacgattggatggcgatgcggcaggtttccaggtcacggatctcgccgatcatgatcacgtccgggtcctggcgcacgatggagcgcagcgccccggcgaagtccaggccgatggcgggcttgacctggatctggttgatgccttcgagctgatactccaccgggtcttccacggtgatgatcttgcgctcggcggtattgagccgcgacagcgcggtgtagagcgtggtggtcttgccggatccggtaggcccggtgaccagcaggatgccgtggggccgcgccagcaggtcgacaaaggcggccaagcgctggccgtcgaagcccaggctgggaaagtcgaactgcacggtttgccggtcgagcaggcgcagcaccaccgactcgccaaaactggtgggcaccgtggacacccgcaggtccagttccttgccctggatacgcaacatgatgcgcccatcctgcggcaaccggcgctcggcgatgtccagccgcgccatgatcttcacccgcgaaatcaccgccgccgacgaactggccggcggcgcttcggcgtcgtgtaacacaccgtcgatgcggtagcgcaccttgagctggtgttcgaaaggttcgatgtgaatatccgaagcacgttgctccaccgcgcgttgcaggatcaggttgaccaggcggatcaccggcgcttccgaggccaggtccttgaggtgttcgatatcgtccagggcaccaccttgttcatcgaggttttcgatcaacgtgcccatggccgaacggccctggccgtagtaacgctcgatcagcgtgtcgacctcagtgcgcgggccgatcgccagccacaccggcacctggcacgcataggccagagcctggaacggataacgcagcgccgggttggcggccagcacgcgcaggccaccctgggtccagcccatgggcgcgacctgatagtgacgcataaagcgttcagtcagggcgggcaaaggatcgagcaacggcggcgcggcgtcggccagcaacagcggcgcaccgagcaacgccgcccaggcacgggccaattcgatatcggaaaccaggcccaggcgggccagcaggcttagcaggtcatccgacggcaagcgccgggcgcgctccaggtccaccgttttcaacccggcatgctgcatcagccacgcacacacctggtcggtgtgcgggatctgcatctggcaggcatcaataggcgctgacgacataaggttgaggtatctagtattgcgaaaaagtatggctatttgaaactacttaaacatgccattagttagccataacccaagcgagaacaagccggggttatcgactggaagttatagcgctagttcctgaagagggggaataaaatagacacaatgaccgagaaccccgtgacagagccttagcagctaatagccactacttcgctagtttcaattagccacttatgcgctttcacgcaattaaatggcagcccaataaactcactggacttacttcaccttcgacgcggagcacactcgcactttcgagtggccgttaaccaggattatcgagcattgaaatgtgggagtgcgttggcatgcctgcgtgagtggtttgggggctgcttcgcagcccaacgcggggcaagcccgctcgccacagcaggcccgctcgccacaggaggccgggccggctacacagaacaaaaaccgtatccacgatgcgaagcgagtcggtcttgatcttgatcaggccttggcccgagtgcttttttcaaccaggcacatcggcgtgccagcgaccggctcttgcatcacctgcacctgcacctcaaatacccgccgcatcaactcggcactgaccacctgcgccggtgcgccatcagcgaccagtttgccgccgtgcatcaccgccaagtgatcggcataccggcaagcctggttgatgtcatgcagcacagtgatcaccgtcttgccctcggcagccagttcgcccatcaggtcgagcaattcgacctgatggctgatatcgagataagtggtaggttcgtcgagcaacaccaccggcgcattctgcgccaacaccatcgccagccaggcacgctggcgctggccgccggacaagtccgccagggcgcgatcagccaacacgtccagttccaggcgctgcatggcttggcttacgtgagcctgatcactgccgctcaagcgcccccacagcgagttatgcgggctgcgaccataggcaaccaactggcgcacgctgacgccttcgggcactggcaacacttgcggcaagaacgcgatctgccgtgccaactcccgggcagacaggctggcataggcctggccatccagggtcaactcgccctgggtcggattgaggatgcgcgcgaaggccttgagcaaggtggacttgccgcagccattggggccgatcaacgcggtgaccttgccggcaggcggtgcgaaggacagaccctgcacgatgcgcgtggcgccatagccgatgtccagctcgcgtgcctggagaatactcatgtcatcaacccttgaaccgtgccagcaaccaaagaaaatacggcgcgccgatcaccgccgtaagcaccccggcggggatttcgctgggcgcaatcagcgtgcgccccagcgtatcggcgagaaccagcagcaacgcgccgatcagcatcgcggccggcagcaggtactggtgatgcccgcccaccagccgccgcgccatgtgcggcgcgaccagcccgataaagccaatcggaccgatcacccccacgcccagactggtgagcaacaccgcgcaggccatcgccgaccaacgcgtacggctcagcgcggtgcccaggctgtgggccgcctcatcgcccaaggcgatcaggttgagcggtttggctaggcacaggcccacggggatcagcaccaggaacggcaacaccagcgccacatgatgccagttgcggctccacaggctgccggtcagcgcaagcaacgcggtgttgatatccaacggatgagaaaggatcagaaactcggtgacgctggacaaagtcaccgcaatcgccactccggacaacgcaaagcgcaccccggaaaaactcacgccggtgttgtacagcgccagcagcaacgcgccgccggccccgcccaggcaagccaccagcggcagccaggcaatcggcaactgcggccagccgatgatcgccacggtcagcgccaacccggcgccttgggtcacgccgaggatctccggcgaggccagcgggttgcggatcacgccctgcacaatcgccccggccaggccgaaggccgcacccgcgaggatcgcgatcaggctgcgcggcaggcggtggttccacacttcgaagtcgagggcgtcgtgggccagcaggcgttccagaacggtgtgcggcgtgagccacagcgtgccggcgctgaggctgaccccggttgccagcagcaacaggccaagcagcagccacaggcgcagtcgtgggcggatcatagggcgcgcctggcaagaaagaggaaaaatggtgcgccgatcaacgcggtgaccacccccgccggcgtttccaccgggaaggccacggcgcggctgagcaggtcggcccccagcacgattaccgcgcccaatgcggcgctcagcgggatcagccagcggtagtcattgcccaggaactgacgcaggatattcggcgcgatcagcccgacaaacccgatcggccccaccgcacacacgctggcgcccaccagcagcaaactggcgacaaacacttgcagacgcaggctggcgatgcccacgcccaacgagcgcgcggcgtcttcgccaaggttgatcaggttcagtcgcggcgcacaccagagtgcccacaggccgccgatcaaggtgcacggccagagcaactgcacctgcgcagcgccgacattggccagggagccggccagccagttgagtacactttgcgcctgggcctcgacgaggatcaccgtgagccgggtcaaggccgcgcacaacgccgccacggccacgccggccaataccaggcggccctgggccgtggtcggcgaccaggcaccgccgaggctgaacaccgtgatccaggccagcgcgccgcccaggcaggtcatcaacagcgcaccaccggcaaagggcagtgcgaccaggccggtggaaaacagcgccagtcccaatgcggcgcccgccgtcacaccaaacagggacggcgacgccagacgattgcgcgtaatgccctgcatcagcgcgccggcgaggcccaggcaggcgccgaccaacgcggcacacacggcccgtggcacgcgcaactgggcgacgatataggccatgttgccgccaacgctgccctggtgcaccaggccattccaggcatccgtcgccgtcagggtgaagggtgaccagctgtacagcgacagccagaacaacacggcacccaacagcagaatgccaatggcggcgaaactgcgttgcacggttattggctcaatacggctttgccgcctttaagaatcgccaacgcgtcctcggcgatctgctccgacgccagcacgccacggttgcgtgcccagctgtcgccatccacttcggccacgtgctgattgcgcacggcgccgagcacttgccacaacggctgcttgctccagctgtcgacgatgctggggcgacggtaatgaccgaccagcaaccaacccgggtcgagggccagcaattgttccaggctgacgaactcggtgggtgcggcattggcgcgtaccgctgggactttcaggccgatggcctcaagcacgctgccggcgtaggagtccgggccatgcacggagaagctgtcctcacgcgccacaccgaacaacacgctggcgccggccgggatctgttgtgcaatggccttaaggttttcacggttcttctggatacgcgcctccatctgcgcactcttgccgagggccttgccgatcagctcggcggatttgaggctgccctggtaatcctcgccacgggacggcaacagcaaggtcggcgcgatgctcgccaggtcgctgtacagcgcctggtggcgattgagatcagcgacgatcaggtcgggcttgagccgggcgatttcctcgatgctcggctgcgaacgcaggcccaccgacttccactggccgatggcctggcgtacgcggggcaacacgcggttggcatcgccatcatcggcggcgccgaccggggtgacgtcaacggcggccaggctgtcgagaaaggaaaactccagcaccaccacgcgcttgggggcatcgggcagatgcacggcgtgctggccatcgttgaggtcgatgggggcggcgctcagcaggctggacgagaacgccaagacacaggcggccagggtggggatggaacgcagcattcgcatgacaaggacctcggcgttaacacaccccagctagacaggccggggaaaacggcgggtactattccatatcggggcggcgtgatcaaaaaacattctcatttatgacctgctcggccatgtggatgctggcttgctggagggggctggcttgtgtggtcactggtttgtgtggtgagcgggcttctgtggtgagcgggcttgccccgcgttgggtggcgaagccgccccaaaacctggcaccgcgttctacctggcacgatgtggtgttcttgttggggctgctgcgcagcccaacgcgggacaagcccgctcaccacaggaagcgcgctcaccacagcaagctcgatgtcagaagtcgacggtggccgacagcaggtaggtgcgcggcgtcgacagggtcagccccggctcgctgtcatccgatgcaccggccgagctccagtagcgtttatcggcgacgttctccacgttcgcccgcagggtgatgtgcttgtcatccaccttgaagccatagcgtgcgccgacgtcgaggcggttccaggcgtcgatttccttgacgttggactggtccaggtactgtgagctggagtagatgccacggctggtcaacgtcaggccttccaggcccggcacgtcccattcggcgccgaggttgacgttgtacttgggcgtcgccggcgcgcggttgccgtcccaggtgccattggtggtgtctttgagtgtgctgtcgatgtacatcaccccacccagcaggcggaagcccttgagtggctcgccgaacacgctcaactccacgccggagttctcacgcttgccattgggcccgaacagccgcgtggtcgcattggtttcataggccggctgcttgatgcgaaacacggcggcggtcaccgcgaaggcaccggcatcgtacttggcgcccacttccacctggcggctgatgaacggcgggaagatctcgtcttcgttcctcgacgtcgacggcgcgatcttgccctggctcaggccttccatgtagttggcgtacaacgacagcttgtcggtggccttgaacaggaggccgcccgacggcgaaagcttttcttcgtcataggcagtgtcgcctttgattccgtcgctccagtcagtcaccttgacccgctgccagcgcgcaccgagggtgagcaacaggcggtcgtcgaaaaagcccagggtgtcggacaaggccacgccactgaatttgttttcggtatagaccttgggatcgaagcgcgtcggccgtgacggcgtcgacgactgcaccgggttgtagagattgctcgacggcgccgtataccgcgcaccgccgttggtgaagtccatgtcgaagtagctggcggccaggttgacctcatggctcaccggcccggtgtggaaccagttgcgcacgccggcggtataggtgcgcacgttttcatcacgggtgaagtcccgcggctgcacgctgaaatcaccggccgcattggtcaccgaaaccgcgtggcgtaggaagtcgtggttgcttttgcgcgcgcccacgccaccgtagagcatcacgttgtcactgaggtcgtactcggcgttgaccgtaccaaaggtgtcattggtgcgagccttgctccacgactgcgcatagttgcggcgcacgtcgttggcactcgggaccggcgcagcggccgccacctgcacgcgctcctggggggcatcggtgtcgcgctcggtgtggccgatatcggtggaaaggcgcaggcgctcgccgcgaaaatccaggcccagcacggccatttcgcggtcgacgctctggtggtcccaggcggtgtcgccggattgcttcacgccgttgaagcgaatgccgtactggttgtcttcgccaaagcgtcggccaatgtccaccgcaccgccggcctggctgtcggaggcccagttgccggtaaacgagttgatgtccttgtcggtggcgcgcttgggcaccacgttgatcccgccgcccacgctgccccgcggcgaaatgccgttgatcaactggctcgggcctttgaggatatcgacgcggtcggccatttccatgtcgatggtgtacgtcggcagcacgccgtacaggccgttgtaggccacgtcactgttgaacaggctgaacccgcgaatggtgaattgctcgtagcgcccaccggccgggttagtggcgcgcaccgaggggtcggcggcgatcaggtcgccgagggtgcgcgcctgctggttcttcaccgcttcctgggtgtaggtggtgatgctgaacggggtctccatgaagtcccgcgtgccgagcatgccctgtgccgtgcggcgcgccacctggccaccggcgtaggtgtcgccgtcgtacaggccggtggtgccgaggatcgacgtgggtgccagctccaggctgctgccctccggcaccggcaccagcatgtaggcctgctcgcccatggcttgcagttgcaggccggagccttgcagcaggcgggcaaagccctcctccacaccgtattcgccggacaggccagtgctgctgcgcccgctgaccagcgccgggtccaccgacaggttgacccctgacaacccggcaaaacgcgtcaacgccgcgctcaggctgccggccggtacctggtaactgcggcgggtgctggtgtcttcggcgtagctgacggcggcgaaaaacgggctggcgctgaggctcagcatcaggctcagtttcagcaaggggcggactgcgggcattggcggaagctctcgatgttgttcacttgcctggaatgacaggcgagatgaaaaaaagggacagccttcagccaattttctttcttaccatactgcgatcgttgaatccgtccttggctccgttccgccgcacaatacaccactgaccggatcacgcaggatgatctggccgcgcccatagtcggtgaggtcgctggcgatctgcacctgatgcccgcgtcgcgccagggcattggccaggtcacgggaggcaccctgttcgatgccgaccttcatgtcgcccagccattgccagcgcggcgcgtccagggccgcttgcgggttgaggccgaagtccaccaggttcatcaccatctgcacatgaccctggggctgcatgtagccgcccatcacgccgaatgggccgagggcctgtccgtcctgggtgaggaagccggggatgatggtgtggaaggttttcttgcccggtgccagacagttggcgtggctcggatcgaggctgaattcctgcccacggttctgcagggcgatgccgctgtcgggcagcaccacaccggagccgaagccgtggtagttgctctggatgaacgagaccatattgccctcggcatccgccgtggccaggtacaccgtgccgctggcatgggggtcgccgggtttgggcggttgcgcctgttcgccgatctgcccacggcggcgggtgctgtaggcatcgctgagcaggtcggcgacggccacgcgcatgtgcagcgggtcggtgatgtagtgcaggccgtcgctgtaggcgagtttcattgcttccaactggcggtgccaggtctgctggctgtcgcggtgatcgaagctgaagccttcgaggattttcagcgccatcagcgccaccaggccctggccgctgggcgggatttcccagacgtccacaccccggtagttgatgtggatcgggtccacccattgggcgcgataatcctgcaggtcgctggcgcgcaggtagccgccactggccttggaatgggcatccaggcgttcggccagggcgccgcgatacaggctttcgcaacgggtcgcggcgagttcttccaaggtgcgcgcctgggccgggttgcggaatatctcaccggccagtggcgcgcggccgtcgatcaggaacgtgtcgaaccaggcgtccagggctgagtcgcgatgggggctgaattcgtccagcgcgacctgccatagctgggcgatcaccggcgacagcgggaagccgtcacgcgccaggctgatagcgggttgcagcaactcggcaaacggcaacttgccgaagcgctcggacagctcggcccaggccgatgggcagccgggcacggtgaccggcgtccagccatacagcggcatccggtcgtgccccgccgccttgaccgcctcgatactcaaggccgccggcgcgtggccgttgccattcaggccgtgcaaccgacccttgcaccagaccagcgcgaacgcatcgccgcccaggccacagccggtgggctctaccactgtgagcgcggccgccgtggcaatcgcggcgtcgatggcgttgccgccctgttgcatcatctggataccggcctgggccgccaggggctgggacgccgcaaccatgccgcgacgggcaaatacgctttggcgctgtgagggataggggtactcgtgagcagaaaatttcaacatggcaaaggctcttccacacaaggtttcgggtcataacacacggctgagaaacgctcgggtccgcgggtggctggggtggctgaagatctgttccggcggcccttgctcgatgagttcgccctggtcgagcaccaccacgcggtcggcgacttcacgggcaaagcccatttcgtgggtgaccaccaccatggtcatgccctcctcggccagctccttcatcacctgcagcacctcaccgacggtttccgggtcgagggcgctggtgggctcgtcgaacagcatggcctggggtttcatcgccagggcgcgggcaatcgccacgcgctgctgctggccgccggaaagcatcgacgggtagtggccggccttgtccgccaggccgacccgcgccagcaatccacgggcttgctccagggcttcggcgcgcggtgtgccaagcacctggatcggcgcttcgatgatgttttccagcgcggtcatgtgcgggaacaggttgaaacgctggaacaccatgccgatgtcgcggcgctgacgcgcgatgttgcgctccgaatcacgcaccaggctgccgtcgctgcgctcgcgatagcccatggcacgaccgttgacgcggatgcgcccgccctggatgtcttccagcaggttgatgcagcggataaaggtggtcttgcccgagccggaggcgccgatcagcaccaccacttcgccgcgccgcacttgcagggagatgcccttgaggatctgcagggtgccgaacgacttgtggatgtccagcgcctcgatgatcagttcttcactctggtgcgccatggttatcgtcccctcagcagtttcaaggtgctgcgcccgaacatgcggctggacgccggtggcggcgcggatggccggtcggactggccgaagcgcgcctccagccagcgctggaaaaagccccacagcgtggtaagcatcaagaagtaaatcgccacgaccaggtacaactcgaacacgcggaacgtcgccgaggtgaccatctgcgtgctgagcagcaactcctgcacgccgatcacgctgaccagggtggtgttcttgagcatcacgttgaactcattgcccagcggcggcacgatcacgcgaaacgcctggggcagcacgatgcgccgcatcagcttggcaaagcccatgcccagggaacgcccggcttcgtattggcccttgtccaccgcgccgatgccggcgcggatgatctcggccatgtatgcgccttcgttcaagcccagcgcgatgatcgccgcctgaatattgccggggatgaccaggccgaacagcgcgatatcctcgaagcggaaaatcccgcccgctgccaacgcggtgtacaggaatacgatctgcaccagcagcggcgtaccgcgcatcagccacacataaaaacgtaccggcaagtgcaacagcgggttcttcgacaagcgcagcagcgccgccgccaaccccagcacacagcccagcagcatcgccgacaccgcgatcaggcaggtcagccacagcccggtgaggtacaccccgctcggctgcaacaggtactgccagaacacatcccaattgaaattcatcgccggtgtgcctcagtcgagtgtgtcgctgctgacatgccacttgttcagcaactggacgtagctgccgtcgctgcgcatgtcgctgatcacttgctgcacggcggcgctgagttgcggatcatctttgcgcatgcccagaccggtgaggatgcggctgaacgctggcacgccttcctggaacagctccggggccatcgccgcgtaataaccggcggtttccacggtggtgccgtaggcatcaacctggctgatgcgcagggcctggaaggcgtcggtatcggtgttgtacaccaccagtttcatcggtgatttgccggccttggccaggctgtcgttctgcgcgtccagcagggtcttgatggtagagccgttgagcaccgcgaccttgtgcccggagagatcatccaggctcttgatgcccttggggttgcccttgggcaccaccaccgactggctggaatacatatagttgacgatgtcgatcacctggcgccgctcgggtttgtcgaacagttggtcgacgatcatgtcgcactgctgggcgagcagcgccggcaccaggccagagaacggaatcacccgccactgcacctgtttgtcgcccaggcgcttggcaatttcgaggcccagctcgacggtgagcccgcggggtttctgtgcttcatcgaaggacaccaggggcggtgaatccatccccgagcagtaggtgagtttgtcgacgttcttcagacgctccggcacctggggcgcggcgacggcccattgggtacagaggccgagggagacagccaccagcaaggcgcggtgtttatgcatgaccagacactccagttcgttgattaacggggcaggactcaacgtcaacacacagcaggtgtttcttattgttgttgttcgctttgcaggaactggatcagcgccggcacggtgccttcgatatgttcgcgcaccacggcttcggcgcgggcggcgtcaccggcacggatcgcgtcgagaatcaccgcgtgttcctggcgggcactgagaggtttttcgccgtgttgcaaccacaggcgcatcggcgcttcgaccagtgagtacagcgccgagatctgcttcatcaggcgcgggcggccactaaggctgcacaggtattcgtggaaggcacggtggcgactgacccaggcggcgctgtcatcacggtagtcgtccatcgcgtcgagcaagcgctccagcgcggccaactggcgctcgccgatgcgccccaccgctacgcgcaccgccaggccttcgagggcgctgcgcatttcgaacacttcgtgcagttcatcgatatccaggccgctgacgatggcaccgcgattgggccgcaagttcaccaggccctgggcgtccaggcggcgaaaggcttcgcgcaccggcatgcggctcatgccgatctcgctggcgatgtcttcggcgatcagacggtcgcctttgcggtaacgaccgccgcaaatggcatcgagcaggaagttgtaggcctcctcctcggcagtgaggggctggcggtcaacgtaagcgggggcaaattgcatcggcagcaccttttgaatttttgtatccaattatccatggatacgaaaaagcaggatgtgtgccaagtgaagtcatgatgagccaagcgcttgattcgaatgaaatagacccgttcgtcaccggaaaacatgaagcgatcgtgcagaagcccgctacctaaccgctcagaaaacgccccatcagtgggcagaagtaacaagcgagggcacgcccgggaatgcctcactcgcagacggcagctcactcatgcgtatgaccgccagtggacggccacacgcggccgctcactgtggccattgctcaagcagtatcgagacgaatttttccgccgcaggcgaaagcgatgagcctcggcggtagaccaagcccaaagaacggttaaccactggctcgatcaacgggacgctgaccaaggtgggatgatcatcagccggcatggccaggcttggcatcgccgaaacccccaggccggcctccaccaggcccaatgaagtcgaaaggtgctggacttcatagaaccattgcggccgccaactcaaacccgatagagcgtggtcgagcagcatgcggttgccgctcaaacgccctaccccgataaggcggtaatcgctcaattcagaccaggtgaccgaactgcgacctgccagctcgtgatcacgccggcacgccaatacaaagggctcactgaccaatggcacgaactcaatgtccggatgctgcccactcatcatgttgataccgaagtcggcttccccgcgcagtaccgcttcaaggccctcattcgcactcaaatccagcagacgtatgcggatttttggatagcgctcgttgtacagacggatcactgaaggcaggaaatagaacgcggcggtagggatacacgccagggttacacgaccgatctggcgttcggccagttcacggatattaagaatcgactcgtcgaagtcatccagcaaccggcgcgccttgggaagaaagtcacgcccgacgctggtaaggctgactttgcgggtggtgcgatccagcaacgccgtgcccagcccctcttccagtttttttatccgccggctgagtgcaggttgagacagatgcaaagcatcggccgcttcgtgaaagctacccaattcggcgattttcacgaaagatcggatgtcgtttagctcatagtccatgtccagtctcgtcagccaaggaaatagggaagtcgtttagcgcacttttatcattcgccaaacgcaataataacgtcaatttttgcattggaaacatttttcaaagcttgagactcttgctcccagagcatcaattacctcgattgatcaacaagagtcagtattatgcaaagaatcccctgtgtgctgatgcgcggtggtacctccaaaggtccggtttttctcgactgggatttgccgtcgtccatcgaggcccgcgacgaactgctactcaacctgatgggctccggtcatgaactggagatcgacggaatcggcggtggcagcccgcaaaccagcaaggttgcgattgtcagcccttcactgcacccggatgcggacgttgattacttgtttgtccaggtgatggtttcgcagcgcagagtcgacagcgcacctaattgcggcaacatgctgtgtgcggttggcccgttcgccatcgaacagggcctggtcaaagccacccccggacgcacccgtgtgcgcattcgcaacgtcaacaccgggaccttcatccattccgaggtgtacacaccggatggcaaagtcagttatgagggcgataccgccattgatggtgtgcccggcaccgcggcgccggtgcaactgaccttcctggatgcagccggcagcaagacgggcaaactctttcccaccggcaacacgcaggacgtcattgatggcattgcggtgacctgtatcgacatggccatgcccatggtgctcgtcgaagccagtcaactgggcaagcgtggcgatgagagcccagcggaactggacgccgataaagaattcctgcgacgccttgagacgctgcggctgaaggccggcctggccatgggcctgggcgatgtcagcggcaaagtgattcccaagccggtgctggtctcgcccgcgaaagctggcggtacgattcaggttcgctatttcatgccgcacaactgccaccgcgcgctcgccattaccggctcgattggtctggccaccgcgtgcgtgatagaaggcagcatcgtcgcgcagatgcttggcggggtcagcacgccgcgtcgtgaagcggtgcgtatcgaacacccaagcggcgggattgatgtcgtattgtcctacaccggccgcaatggtgagacaattcaagcgtccgtcgtacgcaccgcgcgcaggctgttctccggttacgtctacgccactgagtcacagcgcctcgccggataattccggcggtcgttggcatttttgcatccgcacaattctaaaaatgggtgatgccatgaaagttgttaaatcgctctacttccagatcctctgcgccgtggtgctgggcattgtggttgggcatttctgggctcagcaggccatcgcactcaaaccactgggtgatgcgttcatcaagctcatcaagatgatgattgcccccgtggtgttctgcaccatcgtcaccggcatcgccggaatgagcgacaaacgctcgctcggacgcctgctcagcaagaccatgctgctgttttttggccttacggtgatcagcctggtcattggcctggtggcggtatacgtgttccagccgggcgtcggcatgaacattgatcccacccaactgagcaccaaaggcttggcccagtacaccgagtcggcggcaaagcttggggttgtggagttcttcatgcacatcatccccgaaaccttcgtgggtgccttcagtaagggggaagtgctgccggtgctctttattgcggtgttatccgggtttgccttgtcatccctgggcgagcgtggcaagccggtactcgacgtactcgaagccgcttcgcagatggtcttcaagatcttcgcgtacctgatgcgttttgccccggtcggagccttcggcgccctggcgttcaccgtgggtcagtacggcatcacttcgctgggttcgctggcgaagttgatcatgaccttgtacatcgcctgcggcttcttcgtgttcgtgatcctgggcagcatttgccgtagcaacggcttcagcctgtggaaactgttgcgctacttccgtgaagaattcctggtggtgctgggcacgtcctccacggaaccggtcatgccacgcatgctggaaaaactcgaagcgctgggctgcaagaaaggcgtcgtgggcctggtactccccaccggctactcgttcaacctggacggtacggccatttacctgtcgttggcggcgattttcattgcccaggcctgcaacattgacttgagcctgacgcaaatcatcaccatgctggcgatcatgctgttgtcctccaaaggtgccgccggcgtgacgggcagcgggttcgtcgcgctcgcttcgaccttgacggtcattcacgacatcccgttggccggcctggcgctgctgatcggggttgaccgcttcatgtccgaggcgcgcgccctgaccagcctggccagcaacgccgtcgcgacggtagtgatttccctatcggaaaatgcctgccatcgcgaaacgctgcaccggatgctcgacgcaaaaccctctgcgacgccggtagaagcctgggaagacctgaaagtccccaagcgcgtttaacaatcaccgggcaacgcccctccctgacttgacccctcctccgccaggcgcctttggccgcccggcggatcagggcgcgtgcgcctcggcgtcagccactattacgataacaacaagagaatcgtcctatgctcgctttccttggcctggccatggtggtcgtatttaccgtcctcatcatgacgaagcgtttgtcgccaatcgtcgcgctcaccgttgtacctatcgtcttcgcggtgattggcggtttcggtggcaccaccggcaagatgatgctcgacggcctgaaaatggtcgcaccgtctgccgcactgctgttgttcgcgatcctgttctttggcctgatgatcgacgcaggcttgttcgacccgctgatccgcaagatcctcaagcgggtcaatggcgacccgatgaagatcgcggtcggcactgccctgctgtccttgctggtcgcactcgacggcgacggcaccacgacctacatgatcacctgcgcagcgatgctgccgctgtataagcgcatcggcatgaacccgatgatcctggcgaccatttccatgctgtcgctgagcatcatgagcggcatgaccccctggggcggccccgcgacacgggctattgccgcgctgggcctggatgccggcgaatacttcgtgccgttgctgccgaccatgatcggcggcgccctgtgggtgatcttcaccgccttcctgctgggacgtgccgagcgcaagcggatcggcaatgtccaactgcagagcggtggcggcgattgctacatcaacgcgattcttgaggacaccccccacaagcgtccgaaactggcctacgtcaatctggtgctggtcattgcggtgatggcggccctggtgatggggttgatgcactccgcgatcctgttcctgatcggctttgtgctcgcgctgatgatcaactacccgcaattggacattcagaaagaacgcatcctggcgcactcgggtaacgccatgaccgtggtgttgctggtattcgccgccgggatctttgccgggattttttccggcacaaagatggtggacgccctggcacagaccctcgtcgactggatcccgccatcctggggccacctgtttccattggtggtggcgatcaccagcatgccgctgacgttcgtgctgtccaatgacgcctactattttggcgtggtgccgatcctggccaatgccgccgccgcgtatggcatcgatccggttgaaattgcgcgcgcctcgatcctggggcaacccgtccacctcatgagcccgctagtggcctcgaccctgttgctggtgggcatggtcgatcgcgatatcggcgacttccagaaggccaccgtcaaatgggcagtgctgacctcgctggtcgtcaccgcgctggccttgttgaccggggccatcagcctgttcacctgatccacccacaacctctgctgtctttcagcgcgcctcgctcacggggcgcgtgtcgccctgcaccccaaataacaacaaagagtcatttgccatgaaccctatgtatgcccgtcgggctttgttttgcgcgttaggcctggtacccgtcgcaggagccaacgccgaaggttttattgatgacagcaaactcaagctgcaactgcgcaacgtgtatttcaacgagaactttcgcgacgagcacggcttgagtgcgcgagccgccagaacggcaaaaagcgagcgtaccgagtgggcccagggatttctgctggactatcagtccggatttacgccgggcaccctcggctttggcgtggacgccctggggctgtatggcgtgaagctcgattcagggcgcggccgcagtggcaccgggctcatgccggtgcacgatgacgggcgagcggcccacgagttcgccagcgccggcgaaaccgcaaaggccaggttcgccaaaaccacggtcaagtacggcaccttgctgcccaagacgccggtgctgatttacaacgatgcacgcttgttgccccagacctaccagggcacccaggtcagcagcaccgacatcgacaacctgaccgtcaccggcgggcacctggaccgtttcaaactacgcgactccaccaacagcgtgccgatcgtgcccgacggctacagcggggaaaaatcgggagatttcaactacgccggggctgagtacaaatggggcaaaaaccttcgcttgagttatttctacggggaactcgagaacttctaccgacagaactttgccggcatccagcacgacctgccactggccggtggtgtgctgaccagcgacctgcgctacttcaacagtgttgatagcggcgctggctacgcgggcaaaatcgacaatgacatgttcagcggccagttgtcctacgtgatcgcaggccataccgtcggagggggctaccagacccttcgcggagatgccggtctgccctacatcagcggcgccaccgtctactcattcagcaacgccggtatcggcaaattcatcgaggaggacgagaagacctggatgctcaactacggctacaacttcgccgccgtcggcgtacccggcctgaccttctcggcacgctacctgagcggcaatgacggcaagtccacgaccacggtcaaggaatgggagcgtgataccgagctggcctacgtggtgcaggccggcacgttcaaggggctgggggtgcgcatgcgcaactacgtctatcgctctgaattctcccggggccgcgatagcaaccgcctctacctcacctatgacattgccctctggtaagtcgacgatcgcggcccttgcggccgctttccttcaggttaaggtgaggacatcccaacatgctgttcaagaacaaatactgattctgccggtgaccctgcccgttcatggcctgctcaactggagcacttacctgttcaaggacaaggcattgtgatatcactgcttccaaggccgcggcctgaagcggcggttctggagagcggtcgatgagggtatttggcctggcaatactcatcccaacatgcgccgtcagctatctcatctgcacgggtgacacagcaatagcgctggcggccagcttcttgttctatctcagtgcggtcctgctctacatgtatccgtcggtttgcgtagccctcctccaccctgatcctccccgtgccttactcacgaaaaatctccttgcgggctggaccggcatcggctggttcaaggcctatcgttgggcccttgccgaactgcgccaacacgaagcaaatgcactcaagcgcggagatagaaagtgatggcctattggcacttcttcaaaaggcgcaggtcaatcgtgcatcactacccacgttagtacgtcatcatgcacagctggaagaaaatatcgctgaccgagggtctggagcggagcctgccggggcacaaggtcgattgcgttctgatcaatggctggactgctaccgtctttgtcaggtcgccagaaaccgaatcaatgttttgtacaacgggtatcaacctggccaagcttgcagaccgctcgagcgtgcagcagcttgcagacgagataacatttgagattgatatgtccaggaccaggagcgccggctagcgctccccctgcttgatcattcaatttcgctgcaacaaggtgttaggcgcgacgccgaacgctttgcggaacgcatggctgaaatgggagaagtcagaaaacccgaagtccagcgcggcctgcgagatactgcgcacctggccgcgctcgatcgcttcacggctggcattcaggcgttccctccaaatctcggcggcgggggttttctggtaccgcgcgaacgcgcgcgtgacggtgcgggtggacacattgtgggcttgagcgatgacctcaatcgacaggtccggctcggccagatgccgttggatgtactgcatgatgcggccgtaaaggtccagttcctggtgagtggccttcaggtcctggagttccaggctgatcaccagaaggtcgagcaacgcctctgaatagcgactggagatgccctgatcctgcaaggatgccggggtaatcgctgcttggcgcagcatttcacgcaagggaatcacgccgggccgccgatcatcgagaaccatcgcggtgtgctccgcaatacgcggcaggcgttcagtcagcaatgcccgcggaatacgcaccaggtgattttcggtaccaccgaggctgaatcggaacggttgcgttgcgtcataaagaaacaaattgccagtggccaggctggcttttcttccgctctgttcaatttgcccatgaccgttccgggcgaaccccagccataaatcgtcggccggaccgctacgcagatgttgcgcggaacgctcccagtaatgcaggggcgatgacagtgaacagatgtccagacggcctaaggtattgaccgcaagcacaccatcgaaactgctctgggacaagggtttgctatcggccgccaggcaatggcggcagaccacttctttccagtaatcaaagcgacgtggtgcagcaacagcaagggtcgaatactgagtgcttggattcatggcactgacctcggtacggcaatacagttagagctcgaaaaggtgttaccggcttttcagcgctagcaattaataggccagacacattgacggtcgccctcacgtactcatagcgacttcctgcgcccgagcgtccccaataagaggcaaacaggcctgggctttcgacacgggcgcaccaacgccgatcaccggaggggtcccccccggggttgtcttttccaaccaaacggttgtctcgacgaaccaagcggcctctcgccgtcacgcctaatttccacctcacagcagctcaacccccgctgatgaggcacgccatgcatcgacactgttcacaccctttggctgatgcctcctggctcctgcacaggcgcgacctcgtgcctgaagagtcggcttattggttgatcgagtggggggccatgaagctgctgcgccgacgacagaccgccaagcgcgacccgtcgcccaagcactgatgcccacccgtaggcctgaacgaaaataacgaggagctcaacatggaatctgcaatcgacacacatctcagatgcccacgcaccctgtcgcgccgcgtgcccgacgagtaccagccgccctttgccatgtgggttgcacgcgccgacgagcaattggaacaggtggtgatggcctacctcggcgtgcagtaccgaggggaagcgcaacgcgaagccgcgctccaggccatgcgtcacatcgtcggcagcttcagcctggccgatggcccgcagacccatgacgtgacccaccacaccgacaacagcggctttgataacttgatcgtggtcggctactggaaagacccggctgctcactgccgctggttgcgctgtgctgcggtcaacgactggtgggcctcccaggatcgcctcaatgacgggctaggctattttcgtgaaatcagcgcaccgcgcgccgagcagttcgagacactctacgccttccaggacaatctacctggtgtcggcgccgtcatggacaagaccagtggcgaaatcgaagagcacggttactggggctcgatgcgcgaccgctttgcgatctcccagaccgactggatgaagcccacgagtgagctgcaagtgatcagcggtgatcctgctaggggcggccgggtggtggtgctggggcatgacaacctcacgctgattcgttccggccaggactgggcggacgccgaggcggatgaacgctcgctgtacctcgacgaaattctaccgacgttgcaggacggcatggacttcctgcgtgacaacggccagccgttgggctgctacagcaaccggttcgtgcgcaatatcgacctggacggcaattttctcgacatcagctacaacatcggacactggcgctcggtggaaaaactcgagcgctgggccgaatcccacccgacccacctgcgtattttcgtgacgttcttccgcgtggccgccggtttgaaaaagttgcggctgtaccacgaagtgtcagtgtcagacgccaacagccagatcttcgagtacatcaactgccatgcgcacaccggaatgctgcgcgatgccgctgccgcacaaggagaacggccatgaaattgagtcgagtcgtgttggtgctggggatgttgccgtttgccaaaagccaggccctcgaggtcgcgccgggggatttcgaaccgctgcccgccggggccgatgcggtgttgttttactaccagcacgccaaccggtccgagctgtatcagaacggccatcgaacctccgacaacgccaagctcagctccgacgtaggcatcctgcgttacatccatgccataggccttggcgaaaacctttcatgggaaccgcagatcttgctgccgttcggctacatgaacgcctctggcgacgtcggcgcgctgggtgatgcacatggcctgggtgacccgattctcaccgccccgctcaagtggacactccccaccgccaacaaggatgtgtttgccctggccccctacctgtacatccccgtgggcagctacgacaaaaacgacgccttgaacctgggcgagaaccgctggcgggcaacgttacaagcggcctatatccaccacttctcagcgcagtgggcattggacaccgtcgccgacgtgtcctgggtttcgaccaatcacgactacggtaccagcagcgcgaaactcgaagaaaacacgcgctacgagtaccaggccgccgtgcgctacaactggaccccaagcaccacgttcgccctcggtggaggctatgtcaccggggccgcaaccagcatcgacggcgttgaccagcacgatggcgtgtcgacgtcctacgcacgtttcacagtcacgcactttattgatcccacattgcaggtacaggcgcagctcggcagggatatcgaggtggagcaaggcttcaaggaaggcgcgcgcctgaatctgcgcgtcttgaaagtgttctgaatgccgctgtccttttcagccaagtgcgtgtcctgctcaaccatgcgaatacggtgatagacgcctaatttggtgtacatcaccacccggactgaatcgataaaaagacaggaaaatcatggccattactcgtcccacgctggatcagctgttagccatcgcggcccagttgaacatgcgactgacccaggaacaggcagcgtcctatctggatctgatgcaaccaagtttcgatgcatacgatctggtcgacgaactgtgtgatttcgttccgccgatacgttacgagcgcagctcaggctatcgcccctcggccaaggaaaacccgctcaacgcctggtactaccggactgaagtgaatggcgcccgtggcggcctgctggccggtaaaaccgtcgcgctcaaagacaacatcgccctggccggcgtcccgatgatgaacggcgccgcaccgctggaaggttttgtaccgggtttcgatgccaccgtggtcacacgtctgctcgatgccggcgcgaccatcctcggcaaagccacttgcgaacactactgcctgtcgggcggcagccatacctctgacccagccccggtacacaacccccatcgtcacgggtatgccgccggcgggtcgtcatcgggcagcgcggccttggtcgccgccggtgaagtcaacatcgccgtgggcggcgatcaaggcggctccatccgcatcccgtcggccttctgcggcacctatggcatgaaaccgacccatggcctggtgccctacaccggcatcatggcgattgaagcgacgattgatcatgtcggtcccatcaccgccaacgtgcacgacaacgcgctgatgctgcaggccatggccggttccgatggcctcgacccacgccaggcggcgcctcaggtcgatgactattgcagttatctggcgcggggggtgagcgggctcaggatcggtgtgttgcaggaggggttcgcgctggccaatcaggatccgcgcgtggcggacaaggtgcgcgacgctgtcgcccgtctcgaggcgttgggcgcccatgtcgagacagtgtccgttcccgaacacaacctggcaggttcgttgtggcaccccatcggttgtgaaggcctgaccatgcagatgatgcatggcaacggcgcaggctttaactggaaaggcttgtatgacgtcggcctgctggacaaacaggccggctggcgcgaacaggcggaccaattatccgcgtcgctcaagctgtgcatgttcgtcggccagtacggcctgacccactacaacgggcggtattacgccaaggcacagaacctcgcccgctttgcccggcaaggctatgacaaggccttgcagagctatgacttgctggtgatgccgaccacgcccatcactgcccagccccacccgccggcgggctgcgcgatcactgaatacgtggcccgcgccctggaaatgatcggcaataccgcgccacaagacatcaccgggcatccggccatgtcgattccctgcggcctggtggacgggctgcccgtcgggttgatgctggtcgccaggcactacgccgaaggcacgatctaccaggccgcggcggcgttcgaagccgcggtggactggcgcacgctctgagcgcccaacctgaaaacaataagaaagaccggcacgtttcaaccactccacaaccgcgatgactgacaggagataccccatgagtccatctacttccacgcctgcgagcacttcaacccccggtgaacgggcctgggcattgttccaggtcctcaagagcaaggacctgattccagagggctacgtcgagcaactcacgcaattgatggagcacggctggagcccggagaacggcgcccgggtggtcgccaaggcctgggtcgatccgcagttccgggcgctgttgctcaaggacggcaccgctgcatgtgcccagttcggctataccggcccgcagggcgaatacatcgtcgcgctggaagacacgccacaggtaaaaaacgtgattgtctgcagcctgtgctcatgcaccaactggccggtgctcggcctgccacccgagtggtacaagggcttcgagtttcgtgcccgcctggtccgggaggggcgcaccgtgctacgcgaactggggacggagttgccaaccgacgtggcggtcaaggtctgggataccagcgccgaaacccgctacctggtgttgccgctaaggcctgaaggttccgaacacatgagtgaggagcagcttcaggcactcgtgaccaaagacgtgctgatcggcgtcgccctgccctgcgttggctgagaaaaaccacgcatcatcgttcaactcccggagtttctattatggatggctttcacgatctcggcggtttccaaggctttggcaaagtccctcacaccatcaatagcctggactacaaacaggtattcaagcaggactgggagcacctggcgtacagcttgatgttcgtcggggccgatcatttgaaaaagttcagcgtggacgaagtgcgtcatgccgtcgaacgcctggacgtacgccaacatgtcggcacccagtactacgaacgctatgtcatcgcaaccgccaccttgctggtcgaaacgggcgtcatcacccaggcggagctcgaccaggctttgggctctcacttcaagctggcaaatccggcacaggcgggagggcgtgcggcgatcaccggtcgcgctccgtttgaggtcggcgaccgcgtggtcgtgcgcgacgagtacgtggccgggcatatccgcatgccggcctatgtgcgcggcaagcaaggcgtggtgttgcaccgcactgcggaaaaatggccgttcccggacgcgatcggccatggcgataccagcgcggcgcatcagccgacctaccatgtggagtttgcggtgaaagacctgtggggcgatgcagcagatgacggcttcgtggtggtcgatctgttcgaaagctacctggaccacgtcgatgcccctcgagcggtgaacgtatgatggacggcacccaggcgggccgactgccggtgacggtgctttccggcttcctcggtgccggcaagaccacgctgctcaaccatatcctgcgcaatcgcgaaggcctgagggtggcggtcatcgtcaatgatatgagcgacgtcaatatcgatgccgccgaggtgcagcgcgacgtgtcgctgcaccgtggtcgcgatgagctgatcgaaatgagcaacggctgcatctgctgcacgctacgcgccgatctgctcgaacagatcagtgccctggcgcgtcagcagcgtttcgattacctgctcatcgaatccacgggcatctcggagccaatgccggtcgccgagacgttcgccttccttgacgctgaaggcttcagcctcagcgaactggcacggctcgacaccctggtgacggtggtcgatggcagccgttttcaggcgttgctcgcgtcaccggacaccgtggcccgcgacgatacacaggagaacacctctgcacgccctttggcggacctgctgatcgagcaggtggagtacgccaacgtcattctcgtcaacaaacgggacctgatcgacgagccgggttatcaggccgtgcaggcggtcctcgcaggccttaacccgacggcgcggatcataccgatggcccacggccaggttgagttgacccgcctcctcgacacctatctgtttgacttgcccagccttgcggcgtcgccgggctggatgaggaaaatggaggttgaagacgctccggcctccgagtcggacacctatggcgtgacgtcctgggtgtaccgcgaacgcgcgcccttccacccacaacgcttgctcgatttcctccaacagccctggagcaacggacgcctgttacgcagcaaaggttatttctggctggccagccggcacttggaaaccggcctgctagcgcaaagcggcgcgcagttccagtgggactatgttgggcactggtggaacttcatcgagcagtcgcagtggccgcgggatgaataccggttgcagagcatcatggccaagtgggacagcatcgtcggcgactgtcggcaggagtgggtgttcatcggccaggatctcgatacccacgcgttgcagcgtgagctcgacaactgcctgctcagtgccgaagaaatcgccgccggaccgtcggcctggcgagccctgccgggggccgcggcctttgatgcacaggccctgtcggctcccaggcaggctgaatccatttgacgaggtagaggtgttccatgctctttttcagccgaacccaccgctgggtactgacgccgctcgccgacaggctggagcagcctgaccaggcaagcacgccgctgtcgtcgaataacccgatattgcgccgcatcctggccggcgtagaccaactgctgcaggagcggcgaaccctgaaggaccaaacacgcgcattgggcctggaagtcgcccgattggatcagcgcctggccggccgcgacacacaattgcgccaactggaagcgcacttgaccctgatcacccagggcgccggtgaactgttttgggcgctggaactcgatggaaccactgcccctgcgccggactgtgcgctgcaatggatggggtcggcgtcgatccagccccagggtgttgatcaactgggccgttggagtgaacagttgcacccggctgaccagcaagcgcatcgggaggcgcttacccggcatctggccgatcgcagcgggcgtacaccctttgcgttggacgtgcggataaagcctgcaaccggcgacgactatcgctggtgcaggatcagcggtgagtcgcggcgtgatgcgcagggcctcgcggtcgccatcggtggcagcgtacgtgacattcatgaacaacgcctgcacaacgaaacgctcgaactggcggccacccgtttcgatatttcccgggagatgctgcatgacgggctctgggacatcgaggtggtagcgggcgacccggcgaacccgaaaaacaccatttggtggtcgtcgcaaatgcgccggctgctggggtgcagcacggttgaggagttccccaacaccctggaaagctggacctcacgcctgcatcccgacgatagcgctcgggccatcgcagcctttgtcgcccatgtggacgaccgcagcggccggaccccatttgacgtggactatcgactcaaacacaaaaacggcacctaccgctggtttcgcggccgcgggcaaacacgtcgcgccccggacggctccccgcagagggtggtgggcgccattaccgatatccatgcccaccatgaagaaagtgcgatgcgcgaaacgcaggcgcaacagcatcgggtgatgcaggagaccctcagcaagctgacgcagattgtcgccaccatccagggcattgccagccagaccaacctgctggcgttgaatgccgccatcgaagcggctcgcgccggcgaggccgggcgcgggttcgcggtggtcgccgatgaagtgcgcaagctggccacccgcaccagccaggcgacccaacaggcggccgagatgatagacggctaaccacgtgcccccgcgctgcgggcgtgggcaacgcacatattccaacaataacaatcaggtacgttatgcgcgattacaactcagcagtgagctccttcgattttttacgcttggccgcgcaggatttacagggcgagctgaatgccttgaatgcctgcgtcgaatgctgcgaccgacacgccgacgtaaatgccgtggcgttgtattgcgaaacgcgggatggccgcgccacgcactaccgtttcagcgaactgcaagcccacgctgcgcgcttcggcaactttctgcgggaacagggggtcaagcccggagaccgtgtcgcgggcctgatgccacgcacggttgaactgttgatcgccattttgggcacctggcgtatcggcgcagtctaccagccgctctttaccgcgttcggtccaaaggcgatcgagcagcgattgggctgctccaaggcacgctggatcgtgaccgacgtgcacaaccgttccaagctggacgacatccccgactgcccacgcatcctggtgaccggcgatcatgcatggaccccaggcgattacgatttctggagcgcgctggatcgtcaacacgccgagtgcgcgcccgcgttgctggatgccagcgcgccttttttgctgatgtgcacctcaggcaccaccgggccggccaagccgctggaagtgcctttaagcgctctcctggccttcaagggttatatgcgtgatgccatcgacttgcgtgaggaagacccgttctggaacctcgccgaccctggctgggcgtacggcctgtattacgcggtgaccggtccattggcatgcggccatgccacattgttctatgacgggccgttttcggtggagagtacctgccggatcatcgcgaaatacggaatccgcaacctggccggctcaccgacggcctatcgcctgctgatcgcagcaggggacgcgttcgccgacgccgtgcgtggtcacctgcgtatcgtcagcagcgccggcgagccgcttaacccgcaagtcatccgctggtttgccgaacagctcggcgtggtcatccacgaccattatggccagaccgaaatcggcatggtgctgtgcaatcaccatgggctagaccacccgatacgtgagggatcggccggttatgcgatgccgggataccgcattgtcgtgctggatgacgcccaccgggaattgccgactggccagccaggcgtgctggcggtggaccgcgaacgttcgccgctgtgctggttcaagggctacttcgcgatgccgaccaaagcctttatcagcggctattacttgagcggcgatattgtggagttgaatgacgatggcagtatcagcttcgtcggccgtaacgacgacgtgatcaccacctcgggctatcgcgtcggacctttcgatgtcgagagcgcgctgatcgaacacccggcggtggtcgaggccgccgtggtcggcaaacccgacccgcagcgcaccgagctgatcaaggcatttatcgtattgaatggccagtactcgcccagcgccgaattggcggaagtcctgcgcctgcacgtgcgagagcgcctggctgcacacgcttacccgcgggaaatcgagttcgtcgaacaactacccaagacgccaagtggaaagctgcagcggttcattctgcgcagccaggaaatagccaaacagcaggcactcgacacatgactcacgggcgaatggttcctgtgctgagccgaagggagtttcagcgcagagccctggagttgttcaaggagcgcagtttcagccaagtgagcgtgcgtgaattggcggcgcatatcggcataagcccgggagcggtttatcatcacgtcgagagtaaagaggccatgctgtttgaatggctgatggagctgtatcaggcgttgttgtcgcatgttgatttgatcaaaacgcgaagattgacgcccgcgcaacgcctgacaacactgatcgacgctcacatccaactgtatgaccacatgactgtgcacttcaagttggccgtcatggatgccaattgtctaggcgcagcaatgcaggcacgcgttgagcgattgaagcttgcctatgaggcagaattcataaaatgggtcgaccaggcttgccatcagcctggcgggccgttgcgcgagtgtgcgctcacagccattttgccgatgctcaatagcctgcctgcatggttgagccccatgatcgataacgctcagcgtcgagtgatcgcaaagaccatcgccgaagcagtactacacgcgataaacgcgcttccttccaacacgtcgccctgaacggcgagatgcgctgcgctgggtgatgatagacccacccagctttggcgaaccgtcccgcgggctaagccacctgggtcgcaaacctgccaacggcgtcgaccacccgcttggcaccgtcctgaatttcaacaatcacctggcctgcctgagtggcaagctcaaggccttgctcggcttgggacttgctgtttgccatctcagcgacggtttcatcgaccaacttctgattctgcaagacaaccgacgcgatttcttcagtcgctgtgctggtccgtccagccaattgtcgaacctcatcagccacaacggcaaatcctcgaccttgctcacctgcgcgagccgcttcaatcgccgcattcagagccagaagattggtttgctgcgcgatgctgctaatcgtctggataattgagctgatcaacaatgactgtttgcccagcgcttctactcccccagaggccgcctgcatatcaaccgcgattttacgcatggtatgcatcgtgtcgttgacgacgactgcgcctcgttgagcgctgacatccgtttgctgagatatttcaaatgccgtttgggctgccccgctcacttcatgctcacggtccacttgatcggtcactaccgtcgcgaacttcactactttgcaaagattgccttcggtgtcgtaaaccggattgtaggttgcctccagccacaccgtttgtccgcgactgtctatacgttcgaaccggccagcgacaaactcacctctgttcagctttgcccagaagtccttgtactcctgggacgaagtcagctccggtttacagaaaacacggtgatggctcccttttgcttgtcccaggttgtagcccatggcttgtaaaaactgatcatttgccgtcagtacatgcccagagagatcaaactcgatcaccgcggtagaacgtaacaacgcctcgatgaatgaggcattttccgaggctttttctactcgggacgtaatgtttgtcgcgtagcaagtgatgtggctcagctggccgctcgcgtccatgatgggctgccaatgtgcatgaatccacaccaacgaaccatcggcatgaaggtatctgtaatcgtcgctgatcgacttccccgcggccactgcagctcgaaagttatgaaagcacggcagcttggagacgtactggggaacaatctcggccatggggcgacctacaagccgatccggagcatagcccagcgtatttccaaagttttcgttgcaggccatgatgttaaatgagggatcgatacttaacgtcagcatttcacgatccaggccatcgcgcagttggcgaagctctaacagttcactgttctgagattgaagctgtttcttaaggcttgcattgaacataggaagtcgcctcttgggtcatacctatcgtatcggcgtctcatggcacaaattgagggcgtggaccaagaatgaccgctggccccgtgaggaaatcatctggtccaaggcagttgcggacctgaacatcagcgaaatcaccggggagttttgcgcaggcacaaaaaagccgatctagttgatcggcttaagagtctgattttactcaggaataatggtcgggacggagtgattcgaacactcgacccctagcaccccatgctagtgcgctaccggactgcgctacgccccgactaggcgtgttactgggtttgcttcttgacgaagcgaaccggaatataccgcaagcttttgaaatgtggaagtattttaaaagccggaattactttttcagaaccaccagcacatcttcgagttcggcgatcatctggcggatcatttgtttgtattgggtggtgtcgtctttggcttcatcaccggacatacgctggcgcgcgccgctgatggtgaacccctggtcgtagagcaacgcgcggatctgtcggatcatcagcacatcctggcgctgataataccgacggttcccggtgcgtttgacggggttgagttgaggaaactcctgctcccaatagcgcagcacgtgcggttttaccgcacagagctcgctgacttcaccaatggtgaagtagcgtttgcctgggatgacgggtagctcgtcgttatgacttggttccagcataagcctcaactcgggccttcaacttctgccctggacgaaaggtgaccacacggcgagccgtgatcgggatttcttctcccgtttttggattgcggccaggccgctggcgtttgtcccgcaggtcaaaattgccgaaaccggacaatttgacctgttcgttgtcttccagagcgtgtctgatctcttcaaaaaacagctcgaccaattccttggcctcgcgcttgttcagacccaactcttcgtacagacgttccgccatctcagctttcgtcaaagcccccatacgtcacttccttaacgtggcgttcaacctttgttcgagcgaggtgaggatattttgtgtcgtggtattcacctcatcgtcattaagagtgcgcgatggatgctgccaggtcaagccaactgcaaggctttttctatgcggatcaatacctttaccctgatagacgtcaaatagcctgaggtctgtcagccattcccctgcattttcacgaattacatccagaacggcagtggcggctacttcacgatcggcaatcagcgccaggtcacgacgcacttcagggaagcgcgacagctcgctgaatttaggcattttgcccgaagccacttcagccaggagcagttcgaacacaaataccggacgatcaagaccgagggttttcgacaattcagggtgaatggcgccgacgaaacctaccaaacgcccttcgcgctcaacgcgtgcagtttggcccgggtgcaacgccgggtggctgcctggtacgaaggtgaacgcgtccagtgcaccggcaaagcccagcaccgcttccacgtcagccttgacgtcgaagaagtccacggcatcgcggccctgcgcccaaccttcgggcaggcggctaccgcaaacaacaccggccaacatcggctcttgcttcaagccatccagttgaccaacgaaacgcaggccactttcgaacatgcgcacacggtcttgctgacggttcaggttatgggaaagtgctttcaccaggcctggccacagggacgaacgcatggctgccatgtcgttggagatcggatttgccagcaacagcggctcgacgcccgggttgaacagttcgaactgcttcggatcgatgaagctgtaggtcacggcttcctggtagccacgggcaaccagcaggcgacgcagttcaggcaaatgcgcacgcgcctcggccttaggttgcggcgccagacgcgcttgcgggtaacgaaccggcaggcggttgtagccgtagaggcgagccagctcttcgatcaggtcgacttccaggctgatatcgaagcgatggcttggtacttcaacggtccactgcccttccccgcctgcggaaatacccaggccgagggcggacaacagttgctcgatttcagccggtgcgatcaccaggccgagcatctgctcgacgcttttggcgcgcagggtgatcggcgcaaccgacggcaggaactgttcattgacggtttcggtgattgggccggcttcgccgccggtgatttccagcagcaggccagtggcgcgctccatggcttcacgggcgaggttccagtccacgccgcgctcatagcggtgcgaggcgtcggtgtgcaggccataggaacgggccttgccggcaatagcgatctgatcgaagaatgcgctttcgaggaatacgtcgcgagtggtcgcagatacgccgctgtgctcgccacccatcacgccggcaattgccagggcgcgggagtggtcggcgatgaccagggtatcggcacgcaggctgacttcctgaccatcgagcagcaccagtttctcgccttcttctgccatgcgtacgcggatgccgccgttgatttcggcaaggtcgaacgcgtgcagcggttgacccagctccagcatcacgtagttggtgatgtcgacggcagcgtcgatgctgcgcacgtcagcacgacgcaggcgctcaaccatccacagcggggttggcttggacaggtcgacgttgcggattacacggcccaggtaacgcgggcaagcgttgggtgccagcacgtcgatcggacgtacttcgtcgtgcacagcgggtacagcagcaacggccggacgcgtgaccggggcgttgtacaacgcgcccacttcacgcgccaggccggccagggacaggcagtcgccacggttcggagtcaggtcgacctcgatgctggcgtcttccagttccaggtaaacgcggatgtcctggcccacgggcgcgtcggcaggcagttccatcaggccatcattgccctcgccgacttgcagctcggcctgggaacacagcatgccattggactcgacgccacgcagcttggccttcttgatcttgaagtcgcccggcagctcggcaccgatcatggcgaacgggattttcaggcccgggcgcacattaggcgctccgcacacgacctggaaggtttccgtgccattgctgacctggcacacacgcagcttgtcggcatctgggtgttgctcggtgctcagcacctcgcccactaccacaccactgaaaacaccggcggccggggtaacgctatcgacctcaagaccggccatcgacagacgagcaaccagctcgtcgcgatctacttgcgggcttacccagccacgcagccattgttcactgaatttcatcctgctctcctaaagattcgttacgactagcgaaattgcgcgaggaaccgcaagtcgttgtcgaagaacagacgcaagtcgttcacgccgtaacgcagcatggccagacgctctacacccatgccgaaggcaaagcccgagaattcttccggatcgatgccggacatgcgcaacacgttggggtgaaccatgccgcagcccatcacttccagccagccggtctgtttgcagacgcggcagcctttaccgctgcacatcacgcattccatatcgacttcagcggacggctcggtgaacgggaagaacgaaggacggaaacgcaccgccagctccttctcgaagaacacccgcaggaattcttcgatggtgcccttgaggtcggcgaagttgatgtcgcgatcaaccagcaggccttcgacctggtggaacatcggcgagtgggtgatatcggagtcgctgcggtacacacggcctgggcagacgatgcggatcggcggcttgttcgcttccatggtgcggacctgtaccggcgaggtatgggtgcgcaacagcatgttcgcgttgaaatagaaggtgtcgtgcatcgaccgggccgggtggtggcctgggatgttgagcgcctcgaagttgtgatagtcgtcttcgacctcagggccttcggcaatgccgtagccgatgtgggtgaagaactgttcgatacgttccagagtccgggtgatcggatgcaggccacccgaggcctgaccacggccaggcagggttacgtcaatggactcggcggcgagcttggccgcaagatcggcctcctcgagcgacgccttgcgtgcattgagcacctctgtgacacgctccttggcgacgttgatcagcgcaccgacttgcggacgctcttcagccggcaaattccccagggtcttcatcacctgagtcaattcaccttttttgccaaggtagtgaaccctgatttgctccagggcatttacatcttcagcgctttgcacagcctcaagggcttgagcgacgagcgcgtccaggttttccatgtacagactccagatacaaaataggggaagagcttgaaggctcttcccctatttatgacgtttaacaccttgggctacagagtaacccagggtgactgtcgggggtacttaagccaaggtggctttagctttctcgacaatcgcagcaaacgccgctttttcgttcactgccagatcagccagaaccttacggtcgatctcgatggacgcttttttcaggccagcaatgaaacggctgtaggacagaccgttaacacgtgcaccggcgttgatacgagcgatccacagagcgcggaactgacgttttttctgacgacggtcacggtaggcgtattggcctgccttgattaccgcttgcttggcaacacggaatacgcgtgaacgcgcgccgtagtagcctttagcaagtttcagaatttttttgtgacgcttacgggcaatgacgccacgctttacacgagccatgagttacttcctctattcttgatccaaaaattaacgaaggcgcagcatgcgctcgacttttgccacgtcagacggatgcagcaagctgctaccgcgcagttgacgcttacgcttggtcgacattttggtcaggatgtggctcttgaaagcgtgcttgtgcttgataccgttagcagttttcagaaaccgcttagcagcaccacttttagtcttcatctttggcatgttcggatactccgcattcagttgataaacataatcagaaggcctgccgtgccctgttgattacttcttctttttcggggcgatgaccatgatcagctggcgtccttccatcttaggatgctgttcgaccgaaccgtactcgagcaggtcagcttcaacccgcttgaggagttccatccccagctcctggtgggccatctcacggccgcggaatcgcaaggataccttggccctgtccccatcactcaggaaacgtaccaggttgcgcagttttacctggtaatccccttcctccgtccctggacgaaacttgatttcttttacttgaatctgcttctggttcttcttcgccgcagcaatctgcttcttcttctcgaagatcgacttgccgtagtccatcacccggcaaacaggcgggactgcgtcggcggagatttccaccaggtccaatttggactcttcagcgatacgaagcgcttcatcaatcgagacgatgccaatctgctcgccgtcagcgccaattaaccgaacctcgcgtgccgagatattctcgttgatcggggctttcggtgcagctcgtttatcttgtctcatttcacgcttaataataattactccgaatctgggcgaccacgccgggaaaccgcttgcgcgaggaactcagcgaactgggcgacgggcatcgagcccaggtcagcaccttcacgagtacgcacagcgacagtctgcatctcgacttcccgatctccgataaccaaaagatagggaaccttgagcaaagtatgctcgcggattttaaagccgatcttttcatttctcaagtcggacttggcacgaaatccgctttcgttgagtgttttttcaacctcagcggcaaaatctgcctgtttatcagtgatattcatgatcactgcctgggtcggagccagccacgcagggaatgcaccctcgtagtgctcgatcaggatcccgacgaaccgttcgaacgagccaaggatcgcccggtgcagcataaccgggtgtttacggctgttgtcttcggacacatattcggcgcccagacggatcggcaggttaaaatcgagctgcagggtaccacactgccagacgcggccaaggcaatctttcagcgagaactcgatcttcggaccgtagaaagcgccctcgcccggctgcagatcgtacgcaaggcccgcactgtcgagcgcagcggccagtgcagcttcggcgcggtcccacagttcgtcggagccgacgcgtttttccggacgagtggacagcttcatctcgacgtcggtaaagccgaaatcgcgatatacatccatggtcagcttgatgaacgcggcggattcagcctgcatctgctcttcggtgcagaagatgtgggcgtcgtcctgagtgaagccgcgcacgcgcatgatgccgtgcaacgcacccgatggctcgttacggtggcaggcaccgaattcagccaggcgcatcggcaactcgcgatagctcttcaggccctggttgaacacctgcacgtggcacgggcagttcatcggcttgatggcgtaatcgcggttttccgactgggtggtgaacatgttgtcggcgtagttggcccagtgcccggatttctcccacaagctgcggtcaacgacctggggtgtcttgatctccaggtagccgttctcgcgctgaaccttgcgcatgtactgctcaagcacctggtacagggtccagccgttcgggtgccagaacaccatgcccggcgcttcttcctggaggtggaacaggttcaggcgcttgccgatcttgcggtggtcgcgcttttcggcttcttcgatgcgctggatgtaggccgccagctgcttcttgtcagcccaggcggtgccgtagatccgctgcagttgctcgttcttcgcgtcgccacgccagtaggcgccggacagtttggtcagcttgaaggacttgagaaagcgtgtgttcggcacgtgcgggccacgacacatgtcgacgtattcttcgtggtagtacaggcccatggcctgctcgtccggcatgtcttccaccaggcgcagcttgtagtcttcgccacgggcggtgaacacgtcgatcacttcggcacgcggcgtgactttcttgatcacgtcgtagtctttttcgatcagctggtgcatgcgctgttcgatggccgccaggtcgtccggagtgaaaggacgctcgtaggcgatgtcgtaatagaagccttcgtcgatgaccgggccgatcaccatcttcgcggttgggtacagttgcttgaccgcatggccaatcaagtgcgcgcaagagtggcgaatgatctccagcccctcttgatccttgggcgtgatgatttgcaggctggcatcggaggtgatcaggtcgctggcatcgaccagcttgccgtcgaccttgccggctacggtagccttggccaggcctgcaccaatggatgcggcgacctcggctacggaaaccgaatgatcgaatgaacgttgactgccgtcgggaagagtaatagttggcatggcgcctcctctcctagtggtgacccctaccaaaggtcacgtgggttgggatgagccagtacaagatccaacaccaggccgttcaatgatgaacgcctgccttacagcggcaggagcctttcggccaaccgataatcgaaccagagtgactggagtgagctaaaaagaacatggcaaggcggcaattggcgcgcctggaaatagccaagcgcaagatgctagcacagatgaacggtcatcgcggcgctgctatcttgtgtaacgacaaaatccgcgctttatagccgcaaaagtgaacttgagctgtacgcaatgcctcaaacccactgagaatcgccgttcgtcctcgacccaaaggagcatcctcatgatgcgttttacctctaccctcgctctcgccgcttccctgaccctcctttccctcggtgcacaggcagccgccccgtcgaactggccagccggtgcccgtgacagcttcgtcaacgactgcagcgcagccgccagccagaacgtagacgtcaagaccgccaaagaccactgcgaatgtggcgctgacaaaatcaatgccgaattgagcactgcagaaatcaaggaactcatgaccaacccgaacgccaagcctgagcttaaaaacaaagcggtcgcggctatttcgtcctgcaaagtcgtgaagaaaaagtaagatcggccacagatcagacggctttttatcgggcaaaacagcctgaaaactgccatttctcacaaaatacgcagcttttacggctttttttaccagttgatatttcgagcgaaagccccgtagatcggggctttcagccgggacaggtattaaacgcaacgctattgattagcaaacaatgccttgggggggctcccaagccgaacatttcgactatgatagcccggtgtgcccagttggcctgagcagcacagcactactgaaaatatatgtttcttggagatacaccatgtctaatcgccaaaccggcaccgttaaatggttcaacgatgaaaaaggcttcggcttcatcactcctcaaggtggcggtgacgacctgttcgtacacttcaaagctatcgaaagcgacggtttcaaaagcctgaaagaaggccaaaccgtttccttcgtggctgagaaaggccaaaagggtatgcaagctgcacaggttcgcggcgagtaattctccgctgagctaaaaaaaccccgtccatgtgacggggttttttatgggcactgcaaaagccttgagagacttagccgcaattgacccgcgtgatcaccaggttgtcatcggtgttcaggttgaggcggtcggagcggtattccagggtgatcatgtcgttaggcttgaggatacgtgcgttctgcgcaccggcacgggtacgcgcctgttccagcaactggggcgaggctttctggccgatggtgaattcggcggctttcgactcacagcggctatgaccggcatcggccacggcggcgtctttggctggctcagaggcacccggggtgctgcaacccgccaatgcgagtgccgccaacaaagtaccgaatgatgcgagcttccaaggcatgaagcctcctatgataaaaaatggacagagatcgtgcgacagcgattgggcggattggtttcaagacgtaaaccgccgccgggcaagtttgcctgagtcgggacaggcattcgcccgctcaatcgtgaccggatatgaatgtgctcagtagatgtcgatgtagtcgaatgccggcttcggccagttttccttcagagcattgaagatctgtgtcacccagacttcatcactggcggcaacattacctacgtatccggagcccttggcccaggtctccaggcgaaacagcaggccgtcgatatccacgccacctacaacccttcctgaagagatataggcgattccggccttggtcacccgcaactgggcatgttcgtcgtcactggcactggcgagaagctggcgcacattcgccagtgtcaggttctcggggttgttcaaatcgatctgcacgtggtgtccccggcaattaaacaggcggacagtgtcgcacagcagtaacgtcatgccgaaccgccccatgcctaagtatcagtgccaaacgcaatgcaaaatgtttaactggccgggtaagaaccgcgttccagcgcattgccctgtattttcagccccgtgagaccttcatgaccaccgtaacgctccaagccgatatcaaagccaagtggccccaaggacaaagctcatacagccccggcagcccagaggaattggcgattatcggcatcgacctgctggtcaaggaactgggtacgcaggcagcgcaagcgttcatcggccagatattcgagaaatacccggccgatcacatgggggcacacgaccccgagcgcgaataagaaccggctggcgcacgccgaccggtcaacccattacttcagacgcgccaggcgctcggtcagcagatcgaagaagccctgggcatcaccgttctccacccagaacgcgttcttcggttgtttcaggccgtcgtaccagtcgacgatggtctggccgaaggttggaccttcacggctatccaccaccacattgacttcacgaccgctgaacagcgaaggcttgagcaggtaagccacgacggtggcgtcatgcaccgggccgccgggaatgccgtagtgctccatgtcgcccttgacgtattcattgagaatatcgccaaccaccttgctcgcgttgttcttgaggtcggcgatctttttcaggcgggcttcgctggtcagtaccttgtgggtcacgtccagcggcaggtaagtcagcttgacgccgctcttgagcacaatttcagccgcaaccgggtcggcgaacaggttgaactccgccaccggcgtgatattgccgccgttgaagtgcgcgccgcccatcacaacgacctccttgatgccctgggtgatttccggtgcctgggtcagcgccagcgccaggttggtctgcgggccgagcatcgcgatggtgatgctgtgcggcttggcagtgctgagggtcttgatcaggtaatcaaccgcattgccgtcagccaggccctttttcggctcatgcacggtgacgccggaaatgccttccttaccgtgaatattctcggcgtagatcggcgtgcgcagcagcggtgcgggcgcaccagcgtacaccgggatgtcctcgcgccccgcccactcacgggccaggcgtgcattgcgggaggtcttgtccaggcgcacgttgccggcgacggtggtgagcgcgcgaatgttcagctcatccggggaggccatggcgaacagcaatgcgaccacatcgtcagcacctggatcggtgtcgatgatcaggtcgattttttccgccgcctgggcgcttgcagcagtgagcgcagacaaaagcaggacactccggaacaggtttttcagggttggaagaccatattgcataaaacactccttgtcgttgagaacgctagaacgttacgccggacaccagcgcgatattgcagtagggctggcattcaccggtgcgcactaccgcgcgcgcgttgtgagtgagctgcttgaattcgtcatggctgaccagacgccgctcaccgatggccgcctgttctgtgagcgcattcagctcggccaaagccggtggttgcttgagcaggatttcttccgccagcacatggcgttcaacctgcatctcgctgagcacgatacgcaaggtgctgatgaaatccgggatgccctgggtcaacgccaggtcgatcagctcgacacccggcggcaccggcaggccagcgtcaccgatcacgaggatgtcaccatgcccaagcgaggcgatcacgcgcgacagggcaatattgagcagaggtgtctttttcatgagggcacaaaaccttgtacgtcgtgcagcgttggaatagagggttgcgcaccggcgcgggtgaccgacaacgccgccgcgacctggccaaaacgaatggcctcggcctcgctcttgccgttggccaacgccgccgcaaagccaccgacgaacgtatcacccgctgccgttgtgtctaccgccttgaccttgggcgcaagcaggtgctcgaaattcaggccgtcggtaaacagtgcgccctgggagcccaaggtaatgatgactttgccggcgcccgcctggatcaggtgggtggccgcagccttggcactgtcaatggagtcgacggccacaccactcagtgcggcagcttcgctttcattgggtatcaggtaatcaatcgaggcgtaccactcagccggcaacggcgcgctggccggtgcagggttgaggatcaccgtcttgcccagctcacgaccgcgcttgagggcatagcccaccgtattcatcggcacttccagctggcagacgatcacctcagccgcctgcagcaccgcatcaaacgcctgcaatgaggctggcgtcagttcgccgttactgcccgccacgatcacaatcgcgttctggctgctgtcatcgaccacgatcaaggccacgccactggaaccgtccacggtgctgacggcctggcaatcgatgccttccaccaccaacgcatcgcgcaactggatgccataggcatcgctgccgacacagccgatcatcgacacatcggcccccaagcgtgcggaggctaccgcctggttcgcacccttgccaccaggcacggttgagaatgtctggccgatcaaggtttcaccggcacggggcaaccggctggcacgggtgaccaggtccatgttcaagctgcctattaccactacttttgctggcatacatcagtactcatcaattcggttcagcggtattgggcgaacgtaccggagacaggtgccgtcgactcacgcaacacgatgctcggcgtcacgatgcgttgatcaatcggcatttggggtgttgcaattcttcgcagtaaaagttcggccgccgtctcgcccagttgcacgatcgactgcccgaccgtggtcagcgccgggtagacgtaacggctcatttgaatatcatcgaaaccgatcaccgacagctcacccggtacgcggatattgcgctctgccgctgcacgcaacacgccaaaaccaatcatgtcgttactggcaaaaatcgcactgggcgggttttgcgccagcaaatgcacagcggcggcataaccgcccgtgctggtgaaatcgctttcctgggtgcggttggcggccacctcgacaccggcctctcgcagcgcacggtgatagcccgccaaacgcatttgcgcgacacgggtatgggcagggccgccgatgcaagcaatgtcgcgatggcccagttcgagcaagtgccgggtcgccagataggcgccctcctcgtgatcgatacgcaccaggtccacatcaatgccatccagcgcccggtcgacaatcaccatgggcgtgcgcaccgcgctcaagccagcggcaaggccactgtcgtcaccgcccaccgaggtcacgatcaagccgtcgacgcgcttttccaacagcacgcgcaaatagttgcgttgcttttcagcattgtcgtcggagttgcagaggatcacgcagtagccgttacgctcgcagtaatcctcgatgccgcgagccaattccgcaaaatacgggttgaggctgttgggcaccagcaaaccgatcgtggccgtggtcttggccttgagtgagcgcgcgacggcactgggcacatagtcgagctgcttgatcgccgcttcaaccttgatgcgcaccggctcactgaccgggcgagtcttgttcaccacatgggacaccgtggtgtaggaaatacccgcaagcgctgccacatccttgatcgttgccataggtcagccccgccgactggcgcgctggctgcggtaggtgtcgaggaccacggcgatcacgattacggcaccggtgatgatgcgcttggtcggttccgtggccccgatctgcgccaggccagccgccagtaccgaaataatcaacacaccaaagaaggtactgatcaccgagccgcgcccgcccatcaggctggtgccgccgatcaccactgccgcaatcacttgcagctccaggccggaaccggcgttcgggtccgccgcttccaggcgcgaaatctggaacagcgccgccacgccggccagcaggcccatgaggctgaacaccaggatcttgtaaggttttggattgatccccgccaggcgcacagcctcttcgttggtgccgatgccgatcaggtagcgaccaaacacagtgcgggtgagcaccagctgcgcggcgatgattaccagcaacgcgatgatgaacgacggtgaaataccaaaggcaatcgggttggacagccaggcaaacgaatccccgatgtaagcggtgcgcgagccggtcatctggtatgcgacgcctcgggccatttccagcacgccgagggacacgatgaacgatggtatgcgccaggccacggtgatcgagccggtgatggtaccggccaacgccgcgcagcccatgcccagcacggcagccggcaacacgctccagccccagccgaggatcgctacgctgacggccgatgcagccagtgccagcaccgagcccaccgacaggtcgatcccaccgatgatcaggatgaaggtcatgcccaccgccagtaccatcaggtccggaatctggttggccagggtgctgaaggtgtcataggacaggaagtgatcgctgagcaccgagaacagcgcaatcatcgccagcaaggcacccgcaagacccaggtaggtgcccaggccatagaagttgccgccggtcttgccaggggaagttgtggttttcatggggtatccctaagcactgcgtcgttgagcagcgcatcacgtttctgatagccagcaaaggcggcggcgagcaattcgtcctgggtccagctgtcgcgctcgaaggtctcgatcaagcgcccggcggacaacacgccgatgcggtcgcagatcagcatgagttcacgcagatcactggacaccaccaccagcgctttgccctggcgggtcaattcgcccagcaaggcataaatatcgaacttggcacccacgtcgatgccgcgggttggctcatcgaacagcatcaccgagcagtcgcgctccagccagcggccaatcactaccttctgctggttaccgccggacagttcggaaaccaactgcgccggactggaactgcggatgcgcatggcgtcgatctgacgcttggccaaggcggtctcgtcgcggctgctgaccacgccaccgccggagatttccggcatgttgcccagggcaatgttggcgctgatggactgggtcagcagcaggccctcacccttgcggtcttcggtgatcagggcaataccgtggcccaccgcatccacgggcgagcggatgctcaccacctgggctggcgaaccaagcgccacggtgccgctgtcggccaggtcggcgccgaagatcaggcgcaacaactctgtacgaccggcacctatcaggccggagataccgtagatctcaccggcgcgcacttcaaaggacacgtcgcggaccttgtccgagcgagtcaggccttttaccgtcaaggccggaccaccaatggagcgcgggcccaggtcgatgtgctcgcccagctcacgaccgaccatcaaggtgaccagttgctcactgttgtaattggccatcggctcgacacagaccagtttgccgtcgcgcagtaccgcaatgcgctgggcaacacgggccagctcttccagccggtgcgaaatgtaaatgatcgccacgccccgggcctgcaagcgggtgatttgttcaaacagcatctcgacttcacgggccgtcagcatggccgtgggttcgtcaaggatcagtacgtggcagtcgccgatcaggttgcgggcgatttcgaccatttgctgatggccaatacccaggctgccaaccagcgtgtccggatcgatggcatccagcccgacctgggccatggcctcgattgcagccttgcgcagttgcttgcggctgatccagccacagtggctgggcaggttatccaggaacaggttttcggcaacagtcagtgtcggcagcaggttgagctcctgcatgaccatacgcacgcccaactcttcagcctgggtgcggctgccagggcgaaaatcctggccgttgaactgcatgtgcccggtagtcggcgtgaccagcccgccgatgatcttcgacaaggtacttttgcctgcgccgttctctccggtcagcgccagcacttccccgcgattgagcgtcagggtgatgtcggacagaaccggttgggcataggtcttgccgataccgctgaccgagaggacagcgttcggggcggaagatgacataggaaaatctccaggcgcccgcccaggacgagcgggcgctgttgggtgctgccaggattacttcttgaggacgagttcgaccggggtttcgatcacgccatctttggcatcgactttctcacccttgaccagcttgagcgcattctggataccgaacacggcttgctgggcagcagcctggtcagcggtcgccaggacacggccgtcctgcagcatcggcttgatggcttcgatgttgtcgtagcctacgaccagcaccttgccagccttgccggccgcgcgcacggcagagacggcgcccagggccatgttgtcgttaccggccagcagggccttgaggtcggggtattcactcagcatggcggatgccactttctgaccctggtcgatttcccagttgccggattgggtggagacgatcttcatgccggcagcgtccatcgcatccttgtagcctgcggtacgttgctgggcgttggtggtcgtcggaacaccctcgatgataccgaccttgtcacccgaggccagttgcttggccaggtagtcgccgaccagcttggagcctttgcggttgtccgggcctacgaaggggatgtcgaggttcttgcttttgagcacgtccgggtccaggcggttgtcgatgttgacgaccttgataccggcgtccgaagctttcttcagcacggtgacaagtgccttggagtcggcaggcgcgatgacgatggcgttgaccttggcgaggatcatctggttgacgatgtcgatctgcgcactggtatcggtttcgttcttgatcccgttggtgatcatgtcgaaatcggtggcgtgttctttctgatacgccttggcaccatcctgcatggtgacgaagaattcattggcaagggatttcatgaccaggccgaccttgggtttggcggcgtcatcggcaaatgcagaggagagaggcagggcagcagatgcagcagcaagcacagcgacagcaagaagacgtccagcgaatggcagcttcatgggttcactccgatcttatgattattgtgagcaacgcttgcaccgaagaccccttcggcagccttcccacccgggcggctgatacgagctgtcacgatactcaaggagtgctccgtgaaacatctcgcaaacgtttgcgttattcaaactatgagaaccttgtcgagatttgtcaacggttgaaaacagcctttcatccacgccctccctcccgcttgagcataggtgcagttaaacatcgcaccctctcggtcgctccttaaaacgacaggctggtgcgcatcattcatgcatcccccaaagcctggcggtcaactttttcggacaaccgaacacaatgcagtccgatgttcggaaagccggacacccacattatcaacaaacccgaaaaatcaatattaattgttataaatcaatcatttaaattgttttagcgatcacgctgagcctggtacagatcctgctctaccccatcacctcgtggcattcagaaccgcccgggtgttctagatgaacctgctacagcactcatcaaaaaccagagagaaaaataatgaaatctgcactgaagacttttgttccgggcgcgttagccctcctgctgttgttccccgttgccgcccaggcaaaggaagttgaaaccaagaccaaactgtccaacgtggtgatcctcgccaccggcggcaccattgctggcgccggtgccagcgcagccaacagcgccacctaccaggcagcgaaagtcggtatcgagcaattgatcgcgggtgttcctgagcttagccagatcgccaatgtgcgtggcgagcaagtgatgcaaattgcgtccgaaagcatcaacaatgaaaacctgctgcaactgggtcgccgcgtcgccgaactggccgacagcaaggacgtggacggcatcgtgatcacccacggtaccgacaccctggaagaaaccgcctacttcctgaacctggtggagaaaaccgacaagccaatcgtggtggtcggttccatgcgaccaggcaccgccatgtcggcggatggcatgctcaacctgtacaacgctgtggccgtggccggcagtaaggatgcacgcggcaaaggcgtgctggtcaccatgaacgacgagatccagtcgggtcgcgacgtcagcaagatgatcaatatcaagaccgaagcgttcaagagcccatggggcccactgggcatggtggttgaaggcaaatcctactggttccgcttgccggccaagcgtcacaccatgcattcggaattcgatatcaagaacatcaagagcctgccggacgtcgagatcgcctatggctacggcaacgtgagcgacactgcctacaaggccctggctcaagcaggcgccaaagccatcatccacgccggcactggcaacggctccgtgtcctcgaaagtcgtacctgccctggtggaactgcgcaagcagggtgtacagatcattcgctcttcccacgtgaatgccggcggcatggttctgcgcaacgccgaacagcctgacgacaaatacgactgggtcgctgcactcgacctgaacccgcagaaagcccgcatcctggccatggtcgccttgaccaagacccaagacagcaaagagctgcagcggatgttctgggaatactgattcctgactgcccccctgtaggagcgagtttgctcgctcctacaccctcacgctccgccctacatccaattgcctgaattgctgtaagacgaacttcttgaattttaagtagttgcgaaatcacctacagttaaatactgtatgtgcgtacagcttattaaggaatactccgtggcaaagtcctcttccgcagtgcccaccgcacctgatgcctacgaacgcctggctattcgcgtgcaaaagatcatcaattcaaccaacgcccagaaagccaaggcagcgttgatattccgtttgccggacgagcctgaggatgaatgggcgcgcttactggaggaaatcgcagagaacgacaatgtcaccctcgcctatcgtgacgacggtggcgtacagattttctgggttgtaccgaaggaagattgattcaatgattgtccgttttatcgcggtgtgctgcctgttttttgccgtcaccgcccacgcccaggcgccacgcacgttcagtgaagccaagaaaatcgcctggaagctctacgctccacaatccaccgagttctattgcggctgcaagtacacgggcaatcgcgtggacttgaaagcctgtggctacatcccccgcaaaaacgccaatcgtgccgcacgcatcgaatgggagcacattgttcccgcctggcagatcgggcatcagcgccaatgctggcaggacggtgggcgtaagaactgcacgcgccatgatgacgtgttcaagcgcgccgaagcggacctgcataacctggtgccaagcatcggcgaagtaaacggtgaccgtaataacttcagctttggctggctgccggtacaaagcgggcagtacgggtcttgcctgactcaagtggatttcaaggccaagaaggtcatgccgcgcccttccatccggggaatgatcgcccgcacctatttttatatgagcaaacagtacggcttgcgactgtcgaaacaggatcgccagttgtacgaagcctggaacaagacctacccggtgcaggcctgggagcgccagcgtaaccagacagtggcgtgtgtgatggggcgcggcaatgagtttgtcggcccggtgaatctgaaagcctgtagttgaaaatgggcgaaactcccgcccacccggcgcgttactgtgcagccttgtgctcgacaacctgcgattcagtatcggttttcttggcgcgcgccattttctcgttgagcagtgcttgcttggcctcggcttcagccttggtcgcgaacggccccagcaggacttcgtccttgccgtcaaccttcacgatgtaaaagttgaaaccatgttccagcaaccaggccgtaaggtcggtgatggcctgtagcttgtggtccggcggccctacccatacatcccattcctgggcagcaatcgcgccggtttgcggctgggtttcggtcacggcaggcttgctcctgggggcctcgacgcgtttgccctcaccgcaaccggccaatgccaacaccgccattgccatcgctactttacgcactgccctgctcctttaaagataaagaggcgactttatcattcactgtctattctggccgtcataaacgttggcttaaacaatgcgaatcatgtatcgcagacctgtatgatgccgccatgggaattaatgtcgcctctatgcgtcctaaaaagaggcagtcacagggaagcgcttagcagtaagctacacacatccgacacctgccctgtctgaaacatgtgtccttaaaagtaatcaaggagaagtccatgctgatactcacccgcaaagttggtgaaagcataaacatcggtgatgacatcacgatcaccatcctgggcgtcagcggccagcaagtacgaatcggcatcaacgcacccaaggatgttgccgtgcatcgcgaggaaatctaccagcgcatccaggccggtttgactgccccggacaaaaaccagacgccttgaagcgccctcagtagccagccctttcgtacactgtaatggctggcgaaaacctcttcacaccgctcttgtcattgctgcgtgactgacgccaccaatgcgttcatcttcatggaaagatgaaactgtcttcacgcccggaacttgttgtttcattctcagccgaatcttctgactgacactcagccatccgtgtgcattcaggagcacgtcgatgcggcccagacccccaccgccatttgcctacacgtcttggatgatcgccttatcgataggatgggtcttcgcagggctggcctatggtttgaagtatgcaatcgaaggctccggctccaccgcccctcgttcagggctggacttggcgctgctgctttgcgggtacttgttcctgttttgtctcaaacctatccagaagtccgtgcaacgcaggttgtgtcggcaaacgcttcagtgacatcgcgctcatcgccagtagacaccggcatcaacagcgtcacagcgcgagcttggccttttcgtatcagcccgcccccctctgcaagtacaacaagccgtccgcgtcacgctgtacgtctaactgctgatacccgtctatcgaaggatggtcagtggtcataggcgtgtgatgcgtcgacgtcacgaccatcacatccgcgcctgcggcctctcccgcacgaatacccaccgttgcatcttcaaacaccaggcattcatgcaccggcacacccaggcgttgcgcccccaaaacgtaacaagccggattcggtttgccgagggccacatcttcagccgtcaccaataccgccggcggcgcaatgcccgcggcttgcagtcgacgcaacgccaactcccttggagcagaagtgaccaacgcccattgatcacccggcaggcggttcagaaacgccacggcgccggaaatcgccacaacaccttcgacatcattgatttcagcctcggtgatccactgcgcttcaacctcaggatcgacgcccggcaaggcctggcgtgtgatggtgtcgatcgcgcgggcaccgtgaatagtcgtcaagaaagccgccacatccaggccatgacgttcagcccagatgctccacacccgctcggcagcggcaatggagttgagcaaggtcccatccatatcaaacaaaaaggcacggtaacggcgattgaacacggctgaacctcggatagacactgagcgaattcctcatgagcggaaaaatgataggcccgatgcaatctacggatcgccttggtgcttgtaaacgctaccgaggtcgattgcattacaggtttgtaatggagcggtaagccttaccagcaccctcacttcatacagtggagtcgtcagtcacccacaccggatgacgccacttcctactgatgaaaagggtccccccatgaagcctgcaagcaaactctgcctgatcgccgccagcctgctgatgctgggcacaggtaccgccatggccggcaccgtggcgccggtcaaagccaataacgtggtgctggtgcacggttcctgggctgacggctcaagttggtccgaggtgatcacccgcctccaggccgccggtctgcatgtcactgcagtacaaaacccgctgacctcggtggccgacgatgtcgccgccaccaaccgtgtactggcccagcaagacggccccactgttctggtcggccactcctacgccggcaccgtggtcagcgacgccggggccaacccgaaggtcagcgccctggtgtacgtggccgcacgcgcgccggacgccaatgaagactttgtcgcgctctcggcaaagtatccgagcatgccggtgcgggccggcgttgaagaccacgacggctacctcaccctgagccaggaggccttcctcaagtattttgccggcgatgtgccgcatgccaaggccctggagttgtacgccgtgcagcagcccatcaccaagaccctgttcagcggtcgcactgtcaacgccgcctggcacaccaagccttcctggtatgcggtgtcggcgaatgaccagaccatcaatccagacctggagcgcttcctcgccaagcgcatgaacgccaccaccatcgagctgccttcgagccacctgtcgctggtgtcccacgccaaggaaatcaccgacctgatcctcgaagcctccggccgccagccctgagccctgcattacaaacttgtcatcatcctgttggttggctgttcggggtgcctggttactgtgaactcaacgccacgatctggcagccaaccccttaagagagataccgccatgaaactgtttatcctcggctttgccgctctgctcgctaccggttccgtgtttgcaactgaacctgtgatccatgacaaaaccggcttcttcgtacacctggatgtggccaaagtgctgtcgagcaccgacacctacggccaatgcggcattgtcccggcgcgcctcgactacctggacagccagggtcgcgaacatgtgttggactaccaggtccagggcatcggttgcgccagtgacaattgatcgggctacacttgcgccacgcattgagacggggcacttcccatgaacattcttgtagtcgaagacgaacccaaggccggcaattacctgctcaacggcctgcaggaactgggttactccgtcagcctcgcccgtgatggcgtggacggtttgcaccaggccctggaaacaccgttcgacgtgatcgtgctggatgtgatgatgccgaaaatggacggctgggaagtgctgcgtcgcctgcgcaaggaagcggatacgccggtactttttctgacggctcgcgatgacattgccgaccgcatcaagggcttggagctaggtgccgatgattacctgatcaagcctttttccttcgctgaactggtggcacgcttgcgaaccctgacccgtcgcggcccaagccgcgaagaggaacaactgcagatcgccgacttgcaaatcgatgtgctcaagcgtcgcgtcacccgggcaggcacccgtatcaccctgaccaacaaagagttcgccttactgcacctgttcgcaactcatcaggaccaggtgctgtcccgttcgctgatcgcgtcgcgggtgtgggacatgaatttcgacagcgacaccaatgtggtggacgtcgctgtacgacgcctgcgcctgaaaatcgacgaccctttccagctcaagctgatccacagcgtgcgtggcatcggctaccgcttcgatacccaaccatgaacacacgccgtcactactccctgaccctgcgcctggcgctgatcttcgccctgctcgccttcgccctgctggcgaccctcggcgtggcgctgtatcgcgagttggagcgtgaactgatcatgcgtgacgacgcagccttgatctaccgcatcgatcaattgcgcaacctgctcaatgacagcaacaccctggacctgatcaagaccaagccggagttgttccagaacatgctcggcaaccgcgagtcagtgctgagcatcgccgcgccaggccagaagcccctgctgacggtcaaccccggcaatatcgacctgccagacgttccgccggtccccaagaaccacgaactgacgttcgccgacgtgcaccattttcccggcatcaatggggtaccctttgcaaccctggccgcgtccatcgactccggtgacctgggcagcctgcaagtcaccacggggcgcctgatgaccgaacgcaccgccgtactcgccagctatcgcttgagcgtttatatcctggcgagcattgctgcaattatcctggcagtggtcggttacctgctggttcatcgtgggctggtgccgttgcgccgcttggcccggcacgcccagggcattggtgtcggcaaccttgccgaacgcctcgacagccacggtgcgccgaaagaactgctgccgatgatagattcgttcaacaccatgcttgagcggctggccaagggctttgtgcaactgggccaggtgtccaccgacatggcccacgaactgcgcacgcccatcaacaatttgctgggggaaacccaggtcgccctgcaacagcaccgcagcattgaaagttaccagcagttgcttgcgtccaatgtcgaagagcttgaacgcctggcgcggatgctcgacaacatgctgttcctcgcgcgcaccgacccggcgagtgctttgcgtcaacgccaggaactcagtgccgtggatgaggtggaacgcatcgccgagtactttgagggcttggcgggtgatgtggatatcagcattcgtgccgaaggtgaaggcgtgatctgggcggagccgatgctgctgcgcagagccctggcaaatctgtgtgccaatgccatcaaatatggtgcaccgagtaccgagctggagatccgcgccgtgccaagcgccgagggcattcacctgagggtcagcaaccaaggagagaccatcgccgccgagcatctgccgcgcctgttcgaacggttttaccgagtggatgagtcacgggaacgttcggcgcagtccaacgggttggggttatcgattgtggcaaccatcatgcaactgcacaacggacggtacagcgtgagcagtgaggcaggcgtgacgtgttttgagttgttctttccgaaacgggaagattgagcgcaaacgcccggtgttattttgcaaaggtttgtctcttaaccgctcgacgcaagccaggctaattttgcttcccaatgggctcaaggtagagccggcagcggtaaaacaatggagattccaaaatggaaatgcgattaggcttactggaaaaggggctggctgaaatgaatgagaagctgatcaccgtttcgagcaaggcagacgccatggataagcacttcgcttccaaggcagacctggcaactactgaactgaaccttatcaaatggtacgtggcaaccgcattcgccatgacaggcctggcttgcgctatcaccttcgggcttactcgactgtttgcgatttgaggagcgtcgggccgatcagctgacctgcccgcccgcttcctctgcatccacccgtgtttgccacgccaccagcacagctgtctgcagccccgcaaccaacgtatccaacgccattgagggccgctgtgaatctgccacctgctctggcagaaaaggtacgtggataaacccactgcgtaccccagaacctgcgagcgcatgctgcaacaaataaaacacctggttacacacaaatgtcccagccgtctgcgataccgaggccgcgactcccgcctcacgcacggccttgaccatcgccttgatcggcaaggtcgtgaagtaggccgccgggccgccgtctacaactgccgtatcgataggttgctccccgaggttatcggggatgcgtgcatcattgacattgatcgccacccgctcgattgagatatcgctacgcccaggccccaggccagtcgcaattaccatcgccgggtgcaactcttcgatcagcccggccaggcacgggcccgctgtggcaaatgcgcaaggcagtcgacgcgcaacaatctgcacgtcgctgcccagctgcacgccgtccagttggcgcacggcttcccaggaggggttgaccgggtcttgatcaaagggctcgaaacccgtcagcagaactatttgcataacggcctcacatcaacaggtaaagcagcacaatattgaccaccagcatcatcaacgcggtcggcagctgagccttgatcaccgcgttcttgtccggcagctcgagcaatgccgccgggacgatattgaagttggcggccataggggtcatcagggtaccgcagtagccggagaacatgccgatcgccgccatcaccgccgggttaccaccatagatgccgaccagcaccggcacgccgacaccgccagtcatcaccgggaaagccgcgaagccattacccatgatcaccgtaaacaacgccatgcccaacacgtagaccatcaccgccaccaacttgtaatccaggttgatataagtggtggtgacatgcgcgacagccgtaccaaccccagcttcgttgaacagtaagcccagcattgccaacatctgcggcagcaccatggcccagcccagcgcttcagtcaggcgacgggattcacgcaaggcttgcaccggcgtatcgcgggtcaaccagcacgccaggccaagggcgatcaggcagccgataccaagggagacaaaggtggtgtttttcgggtccagcaacggcactccgccaatctcggtgtgcttgagcaataccgagccgatcaccgtggtcagcggaatcgccaacgccgggatgaacagcttgtgccccaggcgacccgcactggcacgggatgccttgtcgtgcaactcggcatgcttgccacggccgacgccgcccatgccggcaatcaaggccatgaccactatgcctaccccgatagccaccgaaggcagacgctcaccgatcaggaatggaatggcgaacaacagccagaacaatgcactggaccaacgcttgggatgggtgcggtccatcaggatcatgcaagccgtgatcagcagcaggaccccggccagccagtacaggtattgaatggaaataatcattgtgcagcctccacggatgcagctgccggcgtcatctctcgggtgagcctgcggtcaaaccgatgcaggcggatcgcgtgaatgatgaaggcgcagatcgcggtaggaatcccccacaccgcaatatgcagcggctccacatcaatccccgaccccagcaggaaggtatgcatcaaggcgattgcaccaaaggcgacaaagatatcctcaccaaaaaacaggccgacattgtcagtcgccgcgcacatcgccagcactttatgacgcagtttgtcaggaagtttgccgtagcgtttttccgctgcaccctcagccatcggcgccagcaacggacgcaccatctgcggatgcccgcccaggctggtcaggcccatggcagccgtggattcacgcacaaacaaatagatgatcaacaaacgcccgaccgtggcgcgctcgaaccgtgcaatccagttctgcgcatgcaggcgcaacccatggcgctccaacaggccaatgaccgccagaggcagcaacagaatcaattgcagggcacgggtctgaaggaagccatcgcccatggtggcgaggattttttccaggggaaaatgggcggcaagcccggtagcgatagcggccgcggtgaccaccaacagagggttgatgcgcaaaacaaagccaaccacgatcacaagtacgccgatcaacggccataagttcacaacagtttgcatggcggtgaggtccttaagtgcgcgctgcggcgccattacagcaggatgtgaacaaagggttcacagcaggaagtggcgtgcagtcggctcggttttttattgttgacccggaaggtcgagcgtcagtggcggcaactttgctgcctggggacgggaggtgtccaacaagaaaaattgttgctgcgaaccaataaattttgtgggtgattgcacagcatgcatgtaacgagatgtggacagacccgcagggattcgcgcatcttagcgccgcctgtcttatcaggcgtgcacctcaaatcagcacactcttcccgattactgttgtggatatggaaattcaatgaaaacccaaaaggtcctgatcgccctctcctgcgcagttgcgctgtccatgctgggtggttgcgccgccaaggtaaaaagtggcggcagcgcagcgctggcgatcccggactccgcgaaacacaacctcgtggtcagcatcaagggcgaaggccaggtcgagcaaaacccggactggaacctgctcaagcgtgactggaacaacgcgctgcaagtggaggcccgccaggccggtttcaacgtcactgaaagccctgcagtggttccgagtggtgaagaaggtgtcggcatcaagatcaatgtgagcaagtttcgctacatcgagccgggctcacggtatgtagccggcgcgctggtaggtaacgcctgggtgttctcccgcgcagattactcggacctcaaatccggcacgccgattggctcgcgcacctacgacacctcgtcatccgcctgggaaggcattgcctcggccatgacgcagaagcaggtgcaggcgattgccaaacagatgatcagcgatatcaagaacgccaaagccaagtaagccgccatcgtgagcgagtttctcgaattcatctggaagctgcttgagttcgcaggcgactacaccccaccacggcgaaaacgcgtgttctcactcgggttcgtgatgtttttgctgctggtggcggttgttgaactggtgttgctgcagatttttcttggagatacgggctgaagagagggtttgcaaaagttttgcaaatcgcaggcaacaaaaaagggcccacctttcggtgagcccttctagaccgcccagcagagcggattttgtttggtaggcgcgattggactcgaaccaacgacccccaccatgtcaaggtggtgctctaaccaactgagctacgtgcctgctgtgaggcggcattctacggaattccggaggggtgtcaacatcttttttgcagctaaccctatgaatatgcgaattttttatttacgcggggcacacccgcggatttcgggtggctggcaggcaattttcaactcaggtaggatcggcgcactcgtaaaaaatataaaacagaggttccaggatggcgaacaccccctatccccagtcgtattacgccgcttccgcgaatgccgttccccctcgcccggtcctgcaaggcgaagtcgaaaccgatgtgtgcgtgatcggcgcaggctacaccggcctctccagtgcgctgttcctgctggagaacggttttcgcgtaacggtgctggaagccgccaaggtgggttttggcgcctcgggccgtaacggcgggcagatcgtcaacagctacagccgggatatcgatgtgatcgagcgcagcgttgggcccaagcaggcgcaactgctggggcagatggcgttcgagggcggcaagattatccgtgagcgcgtggccaagtatcagattcagtgcgacctgaaggacggcggtgtattcgccgcgctcaacagcaagcatatgggccacctggagtcgcagaagcgcctgtgggagcgctacggccacactcaactggagctgctggacgaacgccgtattcgcgaagtagtggcctgtgacaactacgtcggcggcctgctggacatgagcggtgggcacatccacccgctcaatctggcactcggcgaagcggccgccgtggagtccctgggcggtacgatctacgagcaatccgctgccgtgcgtatcgagcgcggcgccaacccggtggtgcataccgccgagggcaaggtcagggccaagttcatcatcgtcgcggggaatgcctacctgggcaacctagtgccggagttggccgccaagtcgatgccgtgcggcacgcaagtaatcaccaccgcccccttgggcgacgagctggcgaaaactttgctgccgcaggattactgcgtcgaagactgcaactacctgctcgactactaccgcctcaccaacgacaagcgcctgatcttcggcggcggcgtggtgtatggcgcacgcgacccggcaaacatcgaagcgatcatccgcccgaagatgctcaaggccttcccacagctcaaagacgtgaagattgactacgcttggaccggaaacttcctgctgaccctgtcgcgcttgccgcaggtaggtcgcctgggcgacaacatctactactcacagggctgcagcggccatggcgtgacgtatacgcacctggcgggcaaggtactggcggaggcactgcgaggccaggcagagcgttttgacgcgtttgccgacctgccacactacccgttcccgggcgggcaactgttgcgcacaccgtttgcggcaatgggcgcctggtactatgggctacgcgacaaattgggattctgactcgaacctgcaggagctcgtttgcgggctcctccaggttgcattatcaaatcgcagacacaaaaaaccccggtctttcgaccagggtctttgctatcggatcaaagtagccagaggcttgctttgtgctccaaggcgttcagtgggccttgaggcagatatggcgcagcggacgggactcgaacccgcgacccccggcgtgacaggccggtattctaaccgactgaactaccgctgcgtatcgcttgaccggttgatcgtaaaccctcaaccgtctttaaacatctgattgatcagccttggctgttcaatctcaagtccgacacatcgaacctggataatatggcgcagcggacgggactcgaacccgcgacccccggcgtgacaggccggtattctaaccgactgaactaccgctgcgcgtcggtgcaacctttaacgttgcgtcttgccctgaagcaaaactctcaagaagtggtgggtgatgacgggatcgaaccgccgaccctctgcttgtaaggcagatgctctcccagctgagctaatcaccctttgcttcgttgaggccgcgaaatttacgcaggtagcagacctaagtcaatagcctgcttgaagtttttctgaaaaagacaaaattgcttcaagacggctatccgccctactcgctgtaaatcatcttcttgctcatgccaccgtccacgacaaactcttgcccggtgacaaaccccgcctggcgcgacagcagccatgccaccatcgccgccacatcttccacggtccccaccctacccgccggatgctgggcgtgatcggcgtcactcaacggctcggcacgccgggccgccgggtcacgcgcatcgatccagccggggctgaccgcattgacccgcacttccggccccaggctcatcgccagggcgtgcgtcagggccagcaggccacccttgctcgccgcataggcctcggtgtccggctccgactggcgagcccgggtcgacgccaggttgacgatggcgccgccgtgggcacgcagatacggcgcacagtgcttggccaacaacatcggcccactgaggttcaccgccagcacccgattccagtacgccaggtccaggctttccagcgtgatgttacgcgggtcggccaccgccgcgttgcagaccaacgcgtccaggcgcccaaactgccccaacacctcggcaacaccctgggcgacttgcttctcgtcggccacatccatgctgataaaccaggcgttgtctcccagtaccttggacaccttggaaccgcgctcgcggtccaggtcggtcaacaccacctgccaaccttcgctgatcagccacgcggcaatcccgaggccaatgccgcgcgcagcacccgtcaccagcgcgacacgcccgttactggccgctgccgcttccatggaccactcgatcacaaggccgccagcccgcgagccaggtcagcttgcaagtcagccacgtcttccaggcctaccgcgatgcggatcaggctgtcacggatacccgctgcctcacgctcctgcggcgccaggcgaccgtgggaggtggtgctcgggtgggtaatggtggtcttgctgtcacccaggttggcagtgatggagatcaggcgtgtcgcatcgataaagcgccaggcgccctctttgccgccctttacttcaaagctaaccacagcaccgaaaccacgctgctgacgctgagccaattcgtgttgtgggtggctcttgagaccggcgtagtgcaccttctcgataccgtcctgttgctccagccactcggccagggcctgggcgttggcacaatgggccttcatgcgcaggctcagggtttccaggcctttgaggaagatccaggcgttgaacgggctcaaggtcgggccagcggtgcgcaggaagccgacaacttccttcatctgttcgctgcgccccgcaaccacaccgcccatgcagcggccctggccgtcgatgaacttggtggccgagtgcacaacgatatccgcgcccagcttcaacggctgttgcagcgccggggtgcagaagcagttgtcgaccaccagcattgcgcccttggcgtgcgccacttcggacaacgccgcgatatccaccagttcggccagtgggttggacggcgactcgacgaacagcagcctggtgttgaccttgatcgccgcatcccagccggacaggtccgccaggggcacgtagtccacttcaatgccgaagcgcttgaagtacttctcgaacaggctaatggtcgaaccgaacacgctgcgcgacaccagcacatggtcgccagcgctgcacaggctcatcaccaccgccaggatggctgccatgccggtcgccgttgcaaccgcctgctcagcgccttccagcgccgcgatacgctcttcgaacgcacgcacggtcgggttggtgtaacgcgaatagacgttgcccggcacttcgccggcaaagcgcgcagcggcatcagccgcagtacggaacacgtagctggaggtgaagaacatcggatcaccgtgctcaccttccggggtgcggtgctggccggcgcgcacagccagggtatcgaaagctacgccatcgaggtcgctgtccaaccgaccggcatcccattcctgactcatgctgccactccttactcgattctttatttaagatacaaaaccggcccctcagggccggttgtcactcagttgttgtacaggtcgatgatcgcgctgaccgcctgggtcttgatcttcgacgagtcgttgcgcgcctgctcgatcttgttcaggtaggcctcgtcaacgtcgccggtcacgtacttgccgtcgaataccgcgcagtcgaactgctcgatcttgatcttgccaccgccgaccgcctcgatcaggtctggcaggtcctggtagatcaaccagtcggcgccgatcaggtcggccacgtcctgtgtcgaacggttgtgcgcgatcagctcgtgggcgctcggcatgtcgatgccgtacacgttcgggtaacgcacggcaggcgctgcggaacagaagtagacgttcttcgcaccggcttcgcgggccatctggatgatctgcttgcaggtggtgccacgcacgatggagtcatccaccagcatcacgttcttgccgcggaactccagctcgatggcgttgagcttctggcgtaccgacttcttgcgcgccgcctggcccggcatgatgaacgtgcggccaatgtagcggttcttcacgaagccttcgcggaacttgacgcccaggtggttggccagctccagcgcagcggtacggctggtgtccgggatcgggatcaccacgtcgatatcatgctcgggacgctcgcgcaggatcttctcggccagcttctcgcccatgcgcaggcgtgccttgtagaccgaaacgccgtcgatgatcgaatccggacgcgccaggtagacgtgttcgaagatgcacggggtgagtttcggtgccacagcgcactggcgggtgtgcagcttgccgtcttcggtgatgtacaccgcttcgcccggcgcgaggtcgcggatcagggtaaagcccagcacgtccagggacacgctttcggaagcgatcatgtactcgacgccttcgtcggtgtgacgctggccgaacacgatcgggcgaatgccgtgcgggtcacggaaaccgacgatgccatagccggtgaccatggccactaccgcgtaaccaccgacgcaacggttatgcacgtcagtcacggcggcaaatacgtcttcttcggtcggctgcagcttgccgcgctgggccagctcgtgggcgaacacgttgagcagcacttccgagtcggagctggtgttgacgtggcgcaggtcagattcgtaaatctccttggccagttgttcaacgttggtcaggttgccgttgtgcgccagggtaatgccgtaaggcgagttgacgtagaacggttgagcttcggccgaagtcgagctaccggcagtcggataacgcacatggccaatacccatgtgcccgaccaggcgctgcatgtgacgctgatggaacacgtcacgtaccaggccattgtccttgcgcaggaataaccggccgtcgtggctggtcacaataccggcagcgtcctggccgcggtgctggaggacggttagcgcgtcatacagcgcctgattgacgttcgacttaccgacgataccgacgatgccacacatgcgacgcaacccctacttaatgaatcttgactgaacacaacttactgaggcgttttggccggcaagaggtgttccttgaacggaagatcagcgggtacgctgattccgctggccagccactgactgctccaccccagaatgaggttcttggaccagtctgcaaccaatagaaattttggcacgagtaccgactcctgccaccacgaatcctgctgtaccggccccaggctcaacagcccgaccgccacgaccaccagcaacgcgccacgcgcggcaccgaaggccatgccgagaaatcgatcggtcccggagaggccggtgacacgtatcaactcgccaataagataattgaccattgcccccaccagcagcgtggcgatgaacatgatggcgcagcccgcgatgacgcgagccgaaggtgtctcgatgtatccagccaggtagaccgacaatgaaccaccgaacatccaggctacgactcctgcgatgatccaagtcagcaacgacagtgcttccttaacgaagccgcggcttagactgatcaaagcggagatggcgacgattgcaacaatcgcccaatcaacccaggtaaatggcacgttgtagcctacggacagatgaggcggcgcattttagcagagcgtcgggctgtcggtaagctgtgattgtggctgccttgcaaatcagtagtttgggacgagtgaatccaatttcaagcacaccccgaaacaactgtgggaggggtaatccccctcccacacttgaccgcatttcaaactcaagccgctgcgaaatcaaccgcgctcaggctggaaccgggtcacgaaacccttgaggttctgctggcgatccagcaaatcgcgcaggcgatccgcctcggcacgctcgatcagcggcccgataaacacccggttcttgccatcggcactacggatataggcattgtagccttggctacgcagcttcttctgcaacgcgtcggccccctcgcggttacccagactggccacctggatcgaccaactgaccggcaagccattcggatcgatgcggctctggccgacgtccggcttgcctggcgcggcaggctgcggcgcaaccggcttgggcgcaggtgcgggcgcagcaggcttggccgctacagtcggcgcaggcgccggcttcaccaccggcacacttggctgtaccggcatcgacggtgcctgctgtgcagccacctcatcattggtcggcacgggctcgtcctcgggtaacgcctggggctcaggcaccaccaccggctgaacctgcacctgaggcactgcaggcgcctgcggcgaggccggtgcctcgacaacgacctgacgctcttcatcctggcgggaaaacagcatcggcaggaagatcaccgccaatgccaccagcaccagggcaccgaccattcgctgcttgtatgcgctatccagtaatgccatgtgcagcttcctccgtggagcgccgggccaaccactcaagcgcctcggcaacacaataaaatgacccgaacaacagaatctcatcgtcgggcgtggcaatggcgcactgtgcttcaagggcatcggtgacgcttgcatacgacgtcacgggcgcagcaaggttctgcaaggccacttccagctcggcggccgggcggctgcgcggcgtatccagcggcgcaacagcccaggcctggacacgacccagcaagggcgcgaccacaccgtccaggtccttgtcggccagcaggccgaatacggcaaggcgttggccgaccggcggcgtgcgtgataggcgttgcgccaggtactcggccgcatgggggttatgccccacatccagcagcaggttcagccgcttgccctgccattcgaattcacgacggtccagacgtccgacgacgcgagtcgccagcaaggtggccgagatctgctcgacattccacggcagatccagcagcagataggcttgcagcgcgagcgcggcgttttccatcggcaggttcagcaacggcaaatcgcgcagttctacggcctggccacgcgcatcgcgcccacaccattgccagtgctgatcaccgatctcaaggttgaattcgcggccccgcaggaaaaacgggcaatccagctcacgcaccttgtccagcaaggtgtacggcgggtcaatgtcaccacacagcgcaggcttgccctggcggaagatcccggccttttcataggccacggactcacgggtattgcccaggtagtcggcgtgatccaccccaatactggtgaccaacgccaaatcggcgtccaccacgttgaccgtgtccaggcgcccacccaggccgacttcaagtaccaccacatccagttgcgcacgctcgaacagccagaacgccgccagggtgcccatctcgaagtaagtcagggagatctcgccccggcccgcatcgagtgcggcgaaggcttcgcagagttgctcgtcggtggcttcgacaccattgagctgcacccgctcgttgtaacgcagcaggtgcggggaattatagacgccgactttcagcccctgggcctgcagcagcgccgcgacaaaggcgcaggtagagcctttgccgttggtaccggtcaccgtgatcacgcgcggcgccgggcggcccaacccgaggcgggccgctacctgttgcgagcgctccaggcccatgtcgatggcggacggatgcaactgctcaaggtaggcgagccattcgcccagggtacgttgggtcataggtttgcaggcaccggcggtacgacgatcggctcgactttaggcgcgacgtacaccggggtcggcaggcccatcatttgcgccagcaggttacccaggcgtggacgcaactcaccgcgcgggatgatcaggtcgatcgcgccgtgctccagcaggaactcgctacgctggaaaccttccggcagtttttcacgcacggtctgctcgatcacgcgaggaccggcaaagccgatcagcgccttgggctcgccgacgatcacatcacccagcatggccaggctggcggatacgccaccgtagaccgggtcggtcagcacggagatgaacgggatgccttcttcacgcagacgcgccagcaccgcagaggtcttggccatttgcatcagggagatcagggcttcctgcatgcgcgcaccaccggaggcagcgaagcagatcatcgggcagcggttttccagcgcgtagttggcggcgcgaacaaagcgctcaccgacaatggcacccatggagccgcccatgaaggagaactcgaacgccgacaccacgactggcatgcccagcaatttgccgctgacggagatcagcgcgtctttctcaccggtctgcttctgcgcggcaaccaggcggtccttgtacttcttgccatcgcggaacttcagacggtcaaccggctccaggtcggcgcccagttcgttacggccttcggcgtccaggaagatgtcgatgcgggcgcgggcgccgatacgcatgtggtggttgcacttggggcaaacgtccagggtcttttccagctccgggcggtacaacaccgcgtcgcaggatgggcacttatgccacagaccttcaggaaccgagcttttcttcacctcggaacgcatgatcgaagggatcagtttgtctactaaccagttgctcatgctttctttctccagtaccggtggcttgaacacagccccgcgtatgcccttgagctaaattcatatgtggcgatgacacaggctggacggggtcagacgttcgaccggccttttcctgcctgtatcctcagccttccagacaacctgccagcgcagggttgccacttcgtttccgggccaccacaggcggcgccgggctgttttacacagtggtagttatggacggcggcagactgccagccgtcacattgcaccactgctgttgcgcacggcctgcatgaatgcgcgaatcttgctgtgatccttgatgcccttgccctgctccaccccgccgctgacatccacggcatacggccgcacctgctcgattgccgccccgacattcgcggggttgagcccgccggccaggatgatcggcttgctcaagccagcgggaatcagcgaccagtcgaacgcttcgccggtaccgccgggtacgccttcgacataggtgtccagcagaatcccgcgagcaccaccgtaggcggcacacgccgccgcgatatcatccccggccttgacgcgcagcgccttgatgtagggacgctgataactttcacattcgtcaggcgtttcgtcgccgtggaactgcaacatgtccaagggtacggcatccagggtttcgttgagttcgcagcggctggcgtcgacgaacaaacccacggtggtcacgaatggcggcaaagccgcgatgatcgcccgcgcctgcaccacattcaccgcccgcgggctcttggcataaaacacgaaaccgatggcatccgcccctgcctcgaccgccgccagcgcgtcttctatgcgggtaatcccgcaaatcttgctgcgaacggctgacatgtcgtgaaaactccagggttggaccgagaaagtcccggatggtaacaaaagctattccgggcgtcagccgccaagttcgctgaaacctgtgaggaagtgtggcccgatgaagcgctccggcaactcgaactcgtcgcggtactccacatccaccaggtacaggccgaacggatgtgccgtgaccccacccgtgcgacgaacgcggctttccagcacttccttggcccactccaccgggcgctcgccggtaccaatggtcatcagcaccccggcgatgttgcgcaccatgtgatgcaggaaggccccggcgcggatatccagcacgatcatcttgccgtggcgggttacccgcaggtggtggacttccttgatcggcgacttggcctggcactggccggcacggaaggcgctgaaatcatgcacacccaccaggtgctgcgcggcctcggccatgcgctcggcatccagcgggcggtggttccaggtgatttcttcgttgaggtgcgccgggcggatctggtcgttgtagatcacatagcgatagcgccgggcgatggccttgaaacgcgcatgaaagtgcgctggcatgaccttggcccaactgacgctgacgtcatggggcaaattgatattggcgcccatcacccaggccttcattgaccgctcagcctgagtatcgaagtgcaccacctggccacacgcatgcacaccggcgtcggtacgcccggcgcacatcagcgaaaccggtgaattggcgactttcgacagggcattttccagggtttcctgcaccgtcagcacgccggatgcctggcgctgccagccgcgatagcgcgagcccttgtattccacgcccaaggcgatgcggtaaaagcctgcggccgccatttcggcggtcgggttatctatatttgccaagaactgagagcctgatgagttgcgcaaaggcggccattatgccggtttgcaggggagcccacaaaagcaaaacggcgacccgaaggtcgccgctgtttgaacaacgggctgttacgccaaccggccgagcatttccttggcctcgccgcgttgaacctcatcgccttcggtcaacacttcggaaaggatatcccgcgcgccgtccgcatcccccatgtcgatataggcctgggcgaggtcgagcttggtggccacctcatccgtgccggagaggaagtcgaattccggctcatcatcgcccagcgccgcgtcttctgcggtaaaggacggctcaatggacggatgctccaggctctgggacaggcgatccagctcggcgttgacatcatccagctccgacgtgaaagcatcgggcttggcggcggcttccggctcatcagccagggacaggtcgaaatcttccggcaaatcgaagtcatccagcgccgcaggcgtgagggtcggcggctcgacggccggcacgtccttcatctgttcgtccaggcccgaaaggaagtcgtcatcggattgcgccgaagccggggcatccagttgcaggtccagatcgaagtccgacaggtcatccgggctggccttggcttcggtctgctgctgcagcagcgactcgaacgtctgctgatcgcccttgacctcggccggggacgcctgctcaagctcgtcgaggctcagatcgaaatcagtgtcaaagacctccggctgcgcaggcgcaggtttgtcttcgagcaaatccttgacgtactgagcgtccagggcagctgcagccacggcggcgctgacacccgccgccaacaccgccatggccgggaagcgactcttgagctgttcgacctgggcatggttttcaccattggccaccagttgacgctcctgggtcacaaagccgtccttgtcgttttgcaggccgtagacttccatcagcttcaagcgcaggtcgctgcgcttgggctcatgcttgatcgcttgctccagtacgtcggctgcctggttcaggtgaccacggtcgatatgggactgggcttgggccagcgcatcgtttgagttcaccggagccacggcaaccgccagcggcgccagtacggaagcaacggtcggcacaacaaccgccggttcaaccaccggagccggggccggtgcggcggccagctttacgctgggcggcggcgtctccagaccttcgaagctgctcggcggcaggtcgtcatggaggttcgaggtgaactccggttcttcagccagggcccgcgccatgcgcaggtgtttttcctcttcgcggcgcgcattgcgatggcgcgcccacaacagcaggagcaacaacaccagtaaacccgccgcaccgccgatcacgccgagcacgatcgggttggtgagcaggtcattgaatttgccgtcggcgctggccggtgccgcgtccgccttgaccggctcaggcgctggcgcgacgggtgcaggggtgacggcctcgggcgtagcaggtgcagtggatggctcgcctgccaactgggcaggcattgctgcagtcgccggagcagccgggacacccttttcagcctgcaaacgcgccagttgatcgtttttcagttgaatcagtttttgcagcttgtccaactggctttgcaggtctgccgcgcggcttttcagctcttcgttgtcgcgtcgggtggtgtccagttgctcctgggtcatcgccaacttgtcgctgagtgccgcgctgtcgcccgccttgcccttggcgcccttcttggcggcttcggccgacaccaggctcaagttgtccttggcgttggtgcttgcaggcgcgttgcctgcctgggtgcgcttggtggcgtccagttgctgtttgcccgctgccgggttggtggcggcgcgtcgaccctggcgccaggcggcattttgcgcgctcacctcagcaattgcctggggttgcggcagcgcagtgctttgtacggcgtccggcaggcgcaggacctggccggttttcagacggttgatattgccgtcgatgaacgcattcgggttcagcgcctggatcgccagcatggtttgctgcacggagccaccattgcggtgcttctcggcgatttcccagagggtgtcgcgggacgtggtggtgtgctgtgccggtttgctcgcggcaggcgcggtgctggccggtgcggccagacgcggcgcaggcgcggcggtcgtcggtgccggctggtcgaacttggccgggtcgagcaacacgctgtagtcacgcatcagacggccattcggccattgcacctgcaacaggaaacgtacgtaggagtccggcaacggcttgctggaggtaacacgcaccacgctgcggccattggggttgatcaccggggtgaacgtcaggtcactgagaaacgcctggcgatcgacgccggcgtccacaaatgcctggtcagaagccaggcttggcgtgatctcggtagcggtgaggccaccgacatcgagcaattcgatttccaccgccaacggctggttcaacttcgacttgagggtcatctcccccagctgcagcgcctgcgccataccggaggacagcgccgaggcggccgctattgctaacaccagtttgcgaacttgaaccatagcctcatcctttgtttgaacactccccggcctgcgagaaggttggtaaccgctgccataaggcatggcgagccgataggtcaccgacgcgcaacttttcctgcctggggccaagcatagcgcctggctagaatcaatctacaaattgccgccaagtatcttttacgcaaggccttttatcaacaactgcgccagctgtactgcattcagtgcggcgcctttgcgtacgttatctgacgtcagccacagatttagttccgccgggtcatccacacctgcccggacgcgaccgacgtagaccacatcctggcccactgcatcgccgacggctgtaggaaaatccccttcatctacgagctcgatgctcggcgcagcctcaagtgcgcggttcaccgcagccagatcgaccgccgcgcccagttgcaaggacactgtcaggctatcgccaaaaaacaccggggcttgaacgcaggttgcggaaatctttagcaaaggtaattccagcactgcgcgcaactcgtggaccaggcgtttttccagggccgtatgcccctgagcatctggcgtgccaacctgcgccaacaggttgaaggcgacctgccgatcaaagaacttcggctccagcgggcgcatattcagcagctcggcggtttgccgggccagttcgctgacggcttcacgcccctgggccgacatcgccaggctggcggtgacgctcacccgctggatatccagcaagccccgcaaaggcgccagcaccaccgccaggttggtcgccgacgggctcgggctgccgagctggaacggcttcttcagaccttccagcacgtgggcattggcctccggcaccacctgcggcgcctgctcggccggcaacgcaccggataagtcgatcaccgagcaccccgccgccgtggcacgcggcgcaaaactcagggtgacagccggccccgccgcaaagaacgccagctgcgccttgctgaagtcaaattcgtcgacttccttgacccgcacattcttgccgcgaaagggcacggaggcgccggccgagttgttgcccgccagcaaatacagggtgcctaccggaaaatccagctcttcgaggatctgcaccagggtttcaccgacggtgccggtggcgccgatcacggcgatttcaaaggtctgggtcatgggggctgcctcgggcattgcggggggagcggcactttaccgggtgactgggggtgaggcaattaagctgggatttgtggtggggctgatggccttatcgggggcaagccccctcccacactcgaacgggttcacaggtcaaaatgtgggagggggcttgcccccgatgaagcccgaccaaacaacaaaaaacccgcgcctgtcatcagaacgcgggtttctctcattgccttacgcgatcaacgctccagcaaaatccgcaacatgcgacgcaacggctcggccgcgccccacagcagctggtcgcccacggtgaatgcaccgaggaactggctgcccatgttcaatttgcgcagacggcccaccggcacattcagggtgccggtgaccttggtcgggctcagctcctgcatgctgatatcacggttgttcggcaccagcttgacccaggggttgtgctggctgatcaaggcttcgatatcgctgatcggcacgtctttgttcagcttgatggtcaacgcctggctgtggcagcgcatcgcgccgatacgcacgcagatgccgtcaaccgggatcgggctcttgaagcggccgaggatcttgttggtctcggcctgggccttccactcttcgcggctctggccgttcggcagttccttgtcgatccatgggatcaggctaccggccaacggcacgccgaagttttcggtcgggtaggcatcgctgcgcatggcttcggccacgcggcggtcgatgtcgaggatcgcgctggccgggtcggccagttgatcggcgaccgcggcgtgggtcgcacccatctgcttgatcagctcacgcatgttctgcgcgccggccccagaggccgcctgataggtcatggcactcatccactcgaccaggccagcttcgaacaagccgcccaggcccatcagcatcaggctgacggtgcagttgccgccgacgtagttcttggtaccggcatccaactgctggtcgatgaccttgcggttgaccgggtcgaggatgatcaccgcgtcatcctgcatgcgcaggctcgacgcggcgtcgatccagtagccctgccagccggcttcgcgcagcttggggaagacttcgctggtgtagtcgccaccctgacaggtcagaatcacgtcgagggttttcagctcttcaatgttgtaggcgtccttgagcggagcaatatccttgcccacggacggcccctggccacccacattcgaagtggtgaaaaacaccggctcaataagatcgaaatcctgctcttccagcatccgctgcatgagcacggaaccgaccataccgcgccaaccgatcagacctacacgtttcatcgcaactacaccttgttaaaaagtgggccgccttgcagcaacaactgcaagcgggcccgagagattacagattccgcagcgcggcgactactgcgtcgcccatttcttgcgtaccgaccttggtgcaaccctgcgaccagatgtcgccggtgcgcaaaccctgatccagcaccaggctcacggcctgctcgatggcatccgccgcatcgctcaaattgaagctgtaacgcagcatcatcgacaccgacaaaatggtcgccagcgggttggcaatgccctggcccgcgatgtccggcgccgaaccgtggcacggctcgtacatgcccttgttattggtgtccagggacgccgacggcagcatgccgatggaaccggtgagcatcgacgcctggtcggacaggatgtcgccgaacaggttgtcggtgacgatcacgtcgaactgcttcggcgcgcgcaccagctgcatggcggcgttgtcgacgtacatgtggctcagttcgacgtcggggtagtccttggccacttcctcgacgatttcgcgccacagctggctggaggccagcacgttggctttatccaccgagcagaccttcttgccacgcacgcgggccatgtcgaagccgacacgggcgatacggcggatttcgctctcgctgtacggcaaggtgtcgtaggcctggcgctcgccattttccagctcgcgtacaccgcgtggcgagccgaagtagataccgccggtcagctcacgcacgatcaggatatccaggcccgccaccacttccggcttgaggctcgaggcgtcggccagttgcgggtagaggatcgccgggcgcaggttgccgaacaggctcagttgcgcgcggattttcagcaggccgcgctcagggcggatgtcacgttcgatcttgtcccacttcgggccacccactgcgccgagcagcacggcgtcggccgcgcgggcgcggtccagggtctcgtcggccagcggtacgccgtgcttgtcgatggcggcgccgccgatcacgtcgtggctcagttcaaagcccaggctgtacttgctgttggccagttccagcaccttgaccgcttcggccatgatttccggaccaatgccgtcgccagggagaatcagaatctgcttgctcatgggttcctcatttcatcaagcgacccgcccgtgggcaggtcgggaaaaatcaatcagcgttcggcaaacaccaccagcacgtcggtgctgaaggtgccgtcggcttgaatttcgtaataatcacgcacttcctggcccatcgccttttgcagctcaaggatcgcggcgcgcaggacctgcggcgtgcgcatgcgctcgacccacgaggtgtattccaggcgcaggcgctggcgactgctggtgcgcacatgcaggccggactcgctgagctgctgcatccactcggcggcggcgtagtcgcgcacgtggctggtgtcgcgcagcacttcgacggtttgcaggtaagtgtccaacagcgggctgcccggtgacaagacatccacgaaagccgccacaccacccggcttgagcacccgacgcacttcacgcaaggccaggccgaggtcgctccagtggtgggccgagtagcggctgaacacgaagtcgaactcgccatcggcgaacggcaggcgctcagcggcgccgttcacggtgcggatgttgtccaggccacggtccgtggcagcggcggcgaccacgtcgagcatctgttgggacaggtcgtaggcgaccacttccttgaccagtggcgcaacgtggaagctgacatgaccggcaccgcagcccaggtccagcagtcgcgcaccgccctgcccggccagttcggcctggagcagcgcgaattcggtgccctgggcgtgcacggcactgctcaggtaggcggaggcttgctcgccgaattgtttttgcacgacttgggtgtgggcggtggtggtcatggtggtttccttgggttttggggtgttggtactggcgctatcgcaggcaagccagctcccacagttggaatgcattccaatgtgggagtcgggcttgcccgcgatggggcccgcacggttaccgccaatcaggcatcgcgaaacaaccaaggctggctcgcccggtgcctggcttcaaacgcggcaatcgcatcgccgtcctgcaaggtcaggccgatatcgtccaggccattgatcaggcaatgcttgcggaaggcatccacctcaaagtggtacaccttgccatctgggcgggtcacggtctgcgcggccaggtcgacggtcagttggtagccctcttcggcctcaacctgcttgaacagctcgtccacttcggcatcgctcaagatgatcggcagcaagccgttcttgaagctgttgttgaagaagatgtcggcgtagctcggcgcgatgatgctgcgaaagccatactcttccagagcccatggcgcgtgttcacggctggaaccgcagccgaagttttcccgggccagcaagacgctggcgccctggtaacgctcggcattgagcacgaagtccttgttcagcgggcgcttggagttgtcctggtaggcgtagcccacgtccaggtagcgccactcgtcgaacaggttcgggccgaagccggtgcgcttgatcgatttcaagaactgcttggggatgatctggtcggtgtcgacgttggcgcgatccaaaggggcgacaaggccggtgtgttgggtaaaagcacgcatcgggtaatcctcagatcaattcgcgaacgtcgatgaaacgaccgttgacggcagccgcagcggccatggccgggctgaccaggtgggtacgcccaccggcgccctggcgcccttcgaagttacggttggaggtggacgcgcaatgctcacccgactccaggcggtccgggttcatcgccaggcacatcgagcagcccggctcacgccattcaaaaccggcttcgaggaagatcttgtccaggccttcggcttcagcctgcgctttgaccaggcccgagcccggcaccacgatggcttgcttgatggtcgaagccactttgcgacccttggcgatcaccgccgcggcgcgcaggtcttcgatccgcgagttggtgcaggaaccgatgaacacgcgatccaactggatgtcggtaatcgcctggttggctttcaagcccatgtacttcaaggcgcgttcgatggaaccacgcttgaccaggtcggcctcctgagccgggtccggcacgttctggtcgacggccaggaccatctccggcgaagtgccccagctgacttgcggcttgatctgggcagcgtcgagctcgaccacggtgtcgaacaccgcatcggcgtcggagaccaggtctttccaggcttcgacagcggcgtcccaatccttgccttgtggggcaaatggacggcccttgacgtattcaacggtcttttcgtccgccgccaccatgcccacgcgggcgccggcttcgatggacatgttgcagatggtcatgcggccttcgatggacaggtcgcgaatcgcgctgccggcgaactcgatggcatggccgttaccgccggcggtgccgatcttgccgatcacagcgagcacgatgtccttggcggtcacgccgaacggcaactggccttcgactttaaccaacatgttcttcatcttcttggcgaccaggcactgtgtggcgaacacatgttccacctcggaggtgccgatgccgtgggccagggcgccgaacgcaccgtgggtggaggtgtgggagtcgccgcagaccacggtcatgcccggcaaggtggcgccctgctccgggccgatcacgtgcacgatgccttgacgcacgtcattcatcttgaattcggtgatgccatattcgtcgcagtagtcgtcgagggtctgtacctgcaaacgcgacacctggtcggcaatggcttcgatgccgcccttgcgctcaggggtggtcggtacgttgtggtccggggtggcgatgatggagtcgacgcgccaaggcttgcgcccggccagccgcaggccttcgaacgcttggggcgaggtcacttcatggatgatgtgacggtcgatatagatcagcgacgaaccatcgtcgcgccgtttcacttcatgggaatcccaaagcttgtcgtaaagcgttttgccggccatcagtcggtcctcatcagcggtgtttctctatgccgggcttttcaataaccctttggcttgtgaggctgatggtatggcgctacattaaataactcaaattcatattttttatgctttggattaccaactggaatacaaccatggacctggccaacctcaatgcttttatcgccatcgccgagaccggtagcttctcgggcgccggtgaacgcctgcacctgacccagccagccatcagcaaacgcattgccggcctggagcaacagttgaaggtgcgtttgttcgaccgcctgggccgcgaagtcggcctgaccgaggccggacgggccttgctgccacgcgcctatcagatcctcaacgtgctggacgacacccgccgcgccctcaccaacctgaccggcgaagtcagcgggcgcctgaccctggccaccagccaccatatcggcctgcatcgtttaccgccggtgctgcgcgcattcacccgggaatacccgaatgtggcgctggatattcagttcctcgattcggaagtggcctacgaagaaatcctccacggccgcgccgaagtggcggtgatcaccctggcacccgatccccacaatctggtgcgcgccaccccggtgtgggacgacccgctggatttcgtggtggcgccggagcacagcctgatcagcaacggccacgtcagcctggccgatattgccgggcacccggcggtgttccccggcggcaacaccttcacccaccatattgtcagccggctgttcgaggcccagggcctcacgccaaatatcgcgatgagcactaactacctggaaacgatcaagatgatggtgtcgatcggcctggcctggagcgtcctgccgcgcaccatgctcgatgatcaggtggcaagtatcgctttgccgggcatacaactcagtcgccagctaggctatatcgtgcacaccgaaaggacgctgtcgaatgctgcgcgggctttcatgagcctattggatgcacaggtcgatctgccagggataccggcatgaaaccgtgcggcctccaggtctgaactgaaccgcgccttacgcccatcgagccaaggccctttgataatgcgcaaccccgtcgactccgtgccacccctgccccgcatttacgccctggaccctcaagaggcggaacaaagctgggacagtgccccgcaactgctggccgcgctcaatgctgcccggctgggcgcctggtgctgggaaatcgacaccggcaggataagctggtcgcggggcacccaggcgctgttcggctttgacccgcgccagccactgcccaaggacctggactacctcgacctgctcgcgccacaggatcgtgcccgcgtggtgcgggcctttcacgcggtattggccggcgagccgttcgaacaggcgatgcatcactatatccagtggccggacggcacccaccactggctggaaatcaatggcagcctggcacctgacaaagccgggcggcggcgcatgatcggggtgatccgcgagaccacccgccagcgcgaacgggagcacgccctcagccactcggaaaaacgcttcgccacgctgtttcacctgtgccccaacatggtcttgctgacgcgccagtccgacggattgatcagcgaggccaaccagtatttcgagatgctcttcggctggccggtcgccgatgccatcggccgcaccaccctggacctgggcctgtggcgccatccggaacagcgtgcgcaactggtcaaggcgacccagcgcaaaggcctgcccatcaccatggaggtgcagttctgcgccagcaacggccagatccacgacggcaccctcagcgcacaaaaggtggagttggacggcgaggcttacctgctcagcacgttcctggataccacagagcgcaaaatagccgagcaggccctcaaggacagccaggaacgcctcgacctggccctggactcggcgcaactgggcacctgggactggcacatccccaccggcatgctctacggctcagcccgcgccgcccaattgcatggcctgccgccggagccgttccatgagttcttcgacgccttctttgacggaatgcccaatgacgagcgcgagagcatgcgcaacgcttatcgcaccctgcgcgaaggcccggccggcaactatcagctgacgtatcgcgtgcccatggaagacggcagctcacgctacctcgaaagccgcgcccgcctgtaccgtgatgagcacggcgcgccgctgcgtatggccggcactctgctggatatcaccgaccaagtggaacgcgaacaacgcctgaccgcctccgaagagaaatttgccagcctgttccaggccagcccggacccgatctgcgttacctgcctggagggcggcgcgtttatcgaaatcaaccccgcgtttacccagacctttggctggacggctgccgaggtcatcgacaaaagtgccgagcagatcggcctatgggacgagtcgagcaagcgcctgcagcgtatcgagcggatgatccgcgagcaggcattgaacaatgtggcgatcgtggtgcatcacaaaagcggccaaagcctgacctgcgtgatttccagccgcctgatcaaggtgggcgaccagccgtgcatcgtcaccacgctacgcgatatcacccagcagcagcgctcggaagcggcgctcaaggccagcgaagagaaattcgccaaggccttccattccagccccgatgccatttccatcactgagcgcgacaccggtcgatatgtggaggtcaatgacggcttctgccgcctgaccggttatcgcgccgaggaagccatcggcctgacgctgtatcagatcggcatctgggccgatgaaaaccagcgcgccgcgctgctggccgagttgcagatcaagggccgcattcatcatctggaaatgctctggcacaacaagcgcggcgagttgctggcggtggaagtctcggtggagcccatcaccctgaatgaaaccccgtgcctgttgctgaccgcccgcgacgtgagcctgctgaaaaatgcccaggcgcagatccgccacctggcctatcacgacccgctgaccaacctgcccaaccgcgccctgctgatggaccgcctgagccagcagatcgccctgctcaagcggcataacttgcgtggcgcactgctgtttcttgacctcgaccacttcaagcacatcaacgactccctcggtcatccagtgggcgacaccgtgttgaagattgtcaccgcgcgcctggaagccagcgtgcgcatggaagacaccgtggcgcgcctggggggggatgagtttgtggtgctgctcagcggcctggaagggtcacgcatggaagtcagcggccaggtgcaggcgttggctgacaccttgcgtgaattgctctcggagccgatgttcctggacggtcatcgcctgcaggtcacgccaagcatcggcgtggcactgattcccgatcacggctccacgccggcggacttgctcaagcgtgccgatatcgccctgtatcgcgcaaaggattcggggcgcaacaccacgcagatgtttcacaacagcatgcaaaaaaccgccagcgaacgcctgcgcatggagacagacttgcgcctggccttgtcacgtggcgagttcagtgtgcattaccaaccccaggtggacgcgcgcggcaacaagatcgtcggcgccgaggccctggtgcgctggcaacacccgcaactgggcgcgcagtcgccttccgaattcatcaaggtgctggaagacagcggcctgatccttgaggtgggcacctggatcctggatgaagcctgcgcggcctttcaacagctgatccacgaaggcttggtagacccactgaatttcagcctgtgcgtgaacatcagcccccggcagtttcgccagaacgacttcgtggagcgggtggagcgcagcctcaagcaacaccagttgccgttcagcctgttgaaactggaaatcaccgaaggcatcgtgatccagaacctggatgacaccatcagcaaaatgcgccgcctgaaaaagctcggcgtgagctttgcgatggacgacttcggcactggctattcatcgctcacctacctcaagcggctgccagtggatgcgctgaagatcgaccagtcctttgtgcgcgacgcgacccatgaccccaacgacgctgaaatcatccgcgccattgtggccatggcccgcagtttgaatctggaggtgattgccgaaggcgtggagaccccggagcaactggcgttcctgcaaaaactgggctgccatttgttccagggttatttgcatagccgacccttgccgatcgaggggttccggcaactgctgaggtagccctcacaccagtttcaatgcccacattgctctatcggaccaccccgatgacgtcaagccgagcttttggccgtacatgtccaccgagccgtttaatgccagcaccgaatgcgtatcgtcagcgagagtaccaatggcgccgccggccaactcttgcgcactgctctgccgcacatgggcaatcaaccccagcctgcgcaacgcctggcctggcgcttctccgtcattcaacgagtgcatggcatcctcaaaactgcgaccggcacgcatgtcgttgttctccagttgcgcacgcttggcgctcacggcgtacaaaaagttggcatcgtccttgagcgccaggtcagaaccggccaggtttgacccctgctcggccttgcgccgctcttcatggctcagaaacagcttgaagccatcgcgcatgatcacgtcaaaaccacccggtacagcgctgatgtttttgtaaatacccgcaggattctgaccaaatttcatcattgcggccttgatcgccgatatcgtgacgcaattgccctcggcaccttgataaaagccgccccatatatccttcggtttcataccgactggcatctgtgaaacaaccgtgtcattgctgaagggcgaaaccgtttcgggccggggtttgtcgttgaacaggcggtagccgtagcctcggccaacacggcgcctttcggtgtagtcgtgcacgacgccaccgaggacaaacgcactgcctcggctatgcgtctccagcactcccgccaccccatccccgaccatctgatgagccgaaacatattgcgacagcccgtacaagcccatgccccgcaggcaccgcagggtcgtctcaccctgcaaggtatcagccaaggcgccgtcgaaactgtgatagccgcccgtaatctgcttgcgcttgacataggcggcaagcgcgacgttggcgctgtcaacggcgccactgtccgcaccggtgaagcgggaagcgcgccttgtctgttcgagttcatgttgggaaatcaccaccttgaactcgtctttcatggtgatggcgtacccccccgcaaccggcgtgaattgggtaaacatgtctttcgggcttgacccaaaggttgccatcatcatcttgatgaccgccgcatgggtgctggtatcaaaattctcgccaaaatgacgccgagaagcttcaaaaccgacgccctttgcggtcggtttggcaaccgcctgtcccgtagcgtgggtaacgtgcctgtagtccggtgaactccaccagccgacaggaggagcaaagacagcaaaggtcataaaccctccgaaaccaaattgaatgagtgaaaaaacgctgcccccaaccagccctccccaatcgcacctgtgatcggggaggctggatccctcatcaagcttttaagacgagccggctgacatcaagactcgtctgcacctcaggcccttaccccttccaatcgaggattcatgaccctgcggaggacggtgggggttttcacttctacagttggctctgcatcaaccttgtccgaaggttgtggccctggagtggccggcgtctggaccttcggctctgcaccgactgctacctcagccttttgctccccgttcgactcgccattcaccttgggttcagtatccgctatcgcctctgccttcgactgagaaatggtctttacttccgcgtccggctgcgtatccagcgccacgcgcgtcgactgcctcgggataatgtcacggatttttactggttggttctccccccacccctctgaactaatccgcacgttgacaccggcctccacgcgtaccctgaactgtttaccttcctcagctgtaacgctcacttgcgtactgccatctggcataacctgcacctgggcatcaccacccgacgtacccacctgtgcgtcaccgccaactttcccctgaacgctatttccgacagtctccgccgacgaacgattgctaaaacccgtgattttcatctgcgcgccgccactcgcgtcggccttgacattaccgtccttgccggttgtcactgtggtcgatttattattatcgtcagcagtcttcacttgcatggaggtatctgcaccgacgcttacattgccgtccttgcccacagtaactgttgccgttttattgtcgccggtggctttaacttgcacagagccgtcagcaccaatactgactttagcgtccttatccgcagtaactgtcgagatattattatcgctagcagtcttcacttgcgtggagccatctgcattgatactcacactcgcaataccaccggagaaccgttcactgttcttggcaaaaggtaacggcttccctttggaattcaccccgccctccacagacacttcaataccactctccgtcattgcggtatgcggaactactgttgcggcttgagaactgaatgccctgccggacaagaggctgcgcatggccttgaagaccagatcaaacatctcaaataatttttccagcgcatcagagttaacggaaatctcctttgctcccgtcaaaggttgattaacgtctcgggcagcccctttaataccgagatccgtagcgagcgtgctcacgcgctcaacatctttcagaagaccagtagaacgttggcttgccgattggagttccggaacaaaagccttaggagtgccaagcgatacattggacatcttgtaacctcatgattagttatgtgctgcctcgaagcatttagaaactcggacagcaattaatataaaactggaaacaatcatcatctcgcagtccctattttcgtggaccaaaacacgatcaagttccaataatccaacttcacataaggcaaacaaaattgaaaatcagattttagcctatggctgtttgaggaaacgctctacacccactgcgccagcgaacgccgcatggacaaacaaggtaacaaccaagcccaaatcaaaaacaatgaaaccattaacccccaacaaaacccaacacttatgctaattgcgcacaagcacgtatcagaaaacaattaacttgcgcttcccccggaaaactaaagcagcaatcaaataactgcctacattcacgctcccacaatcaacatcagtaaacatgaatgcccttgcccttcaggcccgggaacattcacttaaacagcgcacaaaaaagggcgccaagggcgcccactcatcgatgcttttgcaaacttattaaatatgaacgctatttttcagcgccgtcactcactgcgagtctaccggcaccataccgagcaaacgactcacttgggccaactcggtttcccggcgcatggccgtaaacagctccaccgcttccggatagttgcgcgtcagcatcgccagccattgtttcaaacgacctggtgcctgacgctcggtcagttgcgccaccgactgagtccagaagtcctggagcatgggctgcatctgcgcccaggtcatttcaaccacctcctcacccgcccgcgccgcagcgatctgccgcgccaggtccgggcgcgccaccaggccacggcccagcatgatgtcttcggcaccgctgatttcgcggcaacgcttccagtcttcgacgctccagatatcgccattggcgaacaccggcaccttgaccacatcctgcacccgcgggatccattcccagtgcgcgggcggcttgtagccatccgtcttggtacgcgcatgcaccacgatatgcgcggcaccaccctcggccaacgcggtggcacagaccagggcgccgtccgggctgtcgaaacccaggcgcatcttggccgtcaccgggatgtgcgccggcacagcacggcgtacgtgctcgacgatctggttgagcaactccggctccttgagcagcaccgcaccgccacgggacttgttgacggtcttggccgggcagccgaagttgaggtcgatgacctgcgaaccgagctcacaggccagggcagcgttttccgccaggcacaccgggtcggagccgagcaactgcacgcgcagcggcacaccggcagcggtgtgggcaccgtgcagcagttccggggccagtttgtggaaatacgcgggggtgagcaggcggtcgttgacgcggatgaactcggtcacacaccagtcgataccgccgacacgggtcagcacgtcccgcaggatgttgtcgaccaacccctccatgggcgccaaagcaatttgcatggaaaacactcaacaaaaatcgtggcgcagtttactgggtttcccacagcaaccgttaaccccctgtcagggcggggccataaccgtcaaggaattcagccggcatgcgcttgggcttgccagtggacagctcaatgcagacgaaggtggtttgtgcgcgcaacagggtcgcgccgtcacgggggcggaccagttggaagcgccgggtcattttcaggcgctggtcccagtcgacgatccaggtggccagttgcagctcatcgccttcatagccagcggccaggtaatcgatctcatggcgcaccaccgccatggcgcgatccagccggcgatattcgctcaggtccaggcccaggcgctgggagtggcgccaggcgcagcgctccagccaggacacgtataccgcgttattggcgtgccccaggccgtcgatatcttcaggagcaacctgcagatcgatgataaacggcgttgccaaatcccagcccatgccttgctcccagtcgattaatgtcggcggggagagtgtatcaggcgctttgccgctcctgtagacgacggccggccaacaacgccagcacagcgtcgatcacgcgcggatcggccaggactttctggtgaccaccctgctccaggcgcaacaggcgactgtcgaaccaggcttcgtgtatggcctgagaggctttgaccgggacgaaggtgtcgtcttcggcatggacgatcaggcccgggatattcatctgatagtgggccacgtccaaatgcttgagcggcatgccgaaggtcagctcgacctcctggataaacgccgaacgtgcccgcgccggcaagccgaccatcttggtaaagccgcgcaatacatccagaaaccgtgagggtgcagcaatgctcaccaacgcctccgtgcgcagccccaactgcaccgccaacatcgcactggcaccgcccatggagtggccgatgacggcgtgcagcggcggcaactcggcggcagcttcaagcatggcacgggcaaacagcagcacatgggcttcacgccccggcgaacggccgtgggccggaccgtcgagggcaatcaccgagtagccgttgtcgaccaatgcgctgatcaggctggcaaactgggtaggtcggccttcccagccgtgcatcaacaacacggcaggcccctgaccccagcgcaacgcggacaagccgaaacgcagggtgatgcgctccgattgcgccagcagcggcagttcccagtcacgtggcggcaggtcgcggggcgtcatgaaggcgcgacgcatgcgattggcgaccgtttgtggtgccaggtgccccagcgtgccgttgaaacgacgaatccaggtaagcgtgcccatcatgcagccctcttctagcgcacagccgacttggcggcgcgcagcacacggtcagacaactcgcccggtcccaaggcgcgggccagggccaggccaccgatcatcagcgccatgtcagccagggctttgtcggtgtcctcggggctggcagccaactgggcggccatcagttcacagtgctcattcagtgcctggcggaactcatccggcaggcggctcatttcgccgaccgtggcgggaatcgggcaggcctgggcggtggagtcgcggtgcttgcgcgacaggtagaacgccgccaccaggcttctgcgctcctctccggtcagttgtgagtccatgtcatcaatcgacgcacgacgcttggccagcaactgagtgaaggcctccagcatcaatgcatccttgctttcgaagtgcgcatagaaaccaccgaccgtcagccccgccgcacccatcacttcacccacactcggttcggccgggccacgctggatcagcgcggcgctggcggcctgcaaaatgcgttcgcgggtttgcgcttttttatcgctcatcattgcctccgatgttcatgggttgaatattattaccataataatatttggcaagcgacaggcatgaccgttggtcagaagaaaaagcaaggagggcaaaagaattggccaaacgccagacaaacaaaagggccattcaataattgaatgacccttaaaaatcccgcagagcgggtaatcgtggcgtcccctaggggactcgaacccctgttaccgccgtgaaagggcggtgtcctaggccactagacgaaggggacacaaaccttctgtacactgatcaggctgaggctgatcgatccaaggacggtgtggccggaaccttggaactgtaaattggtggagctaaacgggatcgaaccgttgacctcttgcatgccatgcaagcgctctcccagctgagctatagccccggatttttcgtctcgcgacgtagcaggcctttcgaactgcttggtgaaactggcgtcccctaggggactcgaacccctgttaccgccgtgaaagggcggtgtcctaggccactagacgaaggggacaaaaccttctgtacagctgatcagcgctgagagctgatcgattcaaggacggtgtggccagaccttgaacctgtaaattggtggagctaaacgggatcgaaccgttgacctcttgcatgccatgcaagcgctctcccagctgagctatagcccctcatcggtgaggacggggcgaatcttaatggcggtttggaagtgtgtcaaatttattttcaacaatttccaaaattttttgccgggataacaatcacttaccggcgaaaccccggaaaaccggggtttcgtcgtttcaaccgtgtgctcaggcgatggcgcccagcagcttttcccactctttgttttctttcttcgacacaccaccaagcaaatcaagggcttggcgcagacggaaacgcgtcaggtccgggcccaggatttccatcgcatcaagcaccgacaccgaactcgcctgcccggtgatcgcggcaaacatcagcggcatggcatcacgcaatttcaattccagggattccaccaccgcctggatcgtcgcagtgatcgcatccttctcccactggcgcaggctttcgagcttccacaggatcaactgcatcagttggcgaacctggtcgcccgagagtttcttggattcaaacagcttggcatccgggctcacgcccccagcaaagaagaagctggccaacggcgcgacctggctgaacgtctccaccctgccctgcaccagcggcgcgatcttcatcatgtactcagggttcaacgcccactgctgcacacggctggcgaactcttccaccggcagatcacgcagccactggccgttgagccacgacagcttctcgatgtcgaagatcggcccgcccagcgacacacgcgacaggtcaaagttgtcgaccatttcttgcagcgaaaacttctcgcgctcatccggcatcgaccagcccatgcggcccaggtagttgagcatcgcctcaggcatgaaacccatgcgttcgtagaaggtcaccgaagtcggattcttgcgcttggacagcttgctcttgtccgggttacgcagcagcggcatgtagcacagctgcggttgttcccagccgaagtactcgtagagcaggatcagcttcggcgccgacggcagccattcttcgccgcgcaatacgtgggtgatgcccatcagatggtcatcgaccacgttggccaggaagtacgtcggcaagccgtcggtcttcatcagcacctgcatgtccatgcggtcccacgggatctcgacgtcaccgcgcagcatgtccggcaccacgcacacgccttcgctcggcactttcatgcggataacgtgaggctcaccggcagccaggcgccgggccacctcttctttcgacagcagcagcgcgcggccatcgtagcgtggggtttcgccgcgagcctgttgctcggcacgcatctggtccagttcttcggcggtgcagaagcacgggaacgcatggcccatgtcgaccagctgctgggtgtactgcttgtagatgtcgctgcgctcgctctggcgatacgggccgtgcgggccgccgacgtccggaccttccgcccacgtaatgcccagccagcgcaaggcatcgaaaatctgctgttccgactcgcgggtggaacgcaattggtcggtgtcttcgatccgcaggatgaattcaccgccgtgctgcttggcaaagcagtagttgaacaaggcgatgtaagcagtgccgacgtggggatccccagtaggcgatggcgcgatgcgcgtgcggacggtggtcatggcaggtctcgaatgggcgataaaactgaaaattgaaacaaggggcgaatggtaacagcctgggggatttctggaaaaccgcggcgcggctatcgggggcaagccccctcccacatttgaccgaggtccagtgtgggagggggcttgcccccgatgaaaccaccgcaaatcagacggccagcaagcgctcccgcaacttgccgatctcatcccgcgtctgcgccgccgcctcgaactccaggtcccgcgccagctggtacatcttctcttccagttgccggatgcgcttggtgatctcgctcggcgagcgcaattcgttctcgtacttggcgctttcctcggcagccttggccatgcccttgcgcttcttgctgcgcgagcccggcacggtggcgccttccatgatgtcggcgacgtccttgaacacgcccttgggcgtgatgccattttccaggttgaacgcgatctgcttgtcgcgacggcgctgggtctcgccaatcgcccgctccatggaaccggtgatgcggtcggcgtacaggatcgcccggccattgaggttacgcgcggcacggccgatggtctggatcagcgagcgctcggagcgcaaaaagccttctttatcggcatcgaggatcgccaccagcgacacctccggcatgtccaaaccttcacgcagcaggttgatccccaccagcacatcgaaggtgcccaggcgcaggtcgcggatgatctccacgcgctccacggtgtcgatgtccgagtgcaggtagcgcacccgcacgccgtggtcggccaggtagtcggtcaagtcttcggacatgcgcttggtcagcgtggtgaccagcacccgctcttccagggccacgcgcttgttgatttccgagagcaagtcgtcgacctgggtcaacgccgggcggatttcgatttccgggtcgaccaggccggtcgggcgcaccagttgctcgatcacacggcccgcatgctcggcctcgtagttacccggcgtggcggacacaaaaatagtctgcgggctgatggcttcccactcatcaaagcgcatcggccggttatccagcgccgacggcaggcggaaaccgtactccaccaacgtctccttacgcgaccggtcccccttatacatcgcgccgacctgcggcacgctgacgtgggattcgtcgatcaccagcagcgcatccggcggcaggtaatcgtagagggtcggcggcggcgccccggattcgcggcccgacaggtagcgcgagtagttttcgataccgttgcagtagcccagctccaggatcatctccaggtcaaagcgggtgcgctgttccaaacgctgggcttcgaccagtttgttgttggaacgcaggtactccaggcgctcggccagctcgaccttgatgccctcgatggcgcccatcagggtttcacgcggggtcacgtagtggcttttcggatagaaggtgaagcgcggcagcttgcggatcacctcgccggtcaacgggtcgaaggccgacaggctctcgacttcatcatcgaacagctcgatgcggatcgcttccaggtcggattcggccgggtagatgtcgatcacgtcgccccgcacccggaaggtcgcgcgggcaaagtccatgtcgttgcgggtgtattgcaggctggccaggcggcgcagcagttcgcgctggtcgagtttgtcgccgcgatcgacgtgcagcaccatcttcaaataggtttccgggctgcccaggccgtagatgcacgacaccgtggtgacgatgatcgcgtccttgcgctccagcagcgccttggtcgccgacagccgcatctgctcgatgtggtcgttgatcgacgcatccttctcgataaaggtgtcggaggacggcacataagcttcaggctggtagtagtcgtagtaggaaacgaagtactccaccgcgttgttcggaaagaacgccttgaactcgccatagagctgcgcggccagggtcttgttcggcgccagcaccagggtaggacgattgatttgcgcgatcacgttggcgatgctgaaggtcttgcccgaaccggtcaccccgagcagcgtctggtgcgccaggccggcttcgatgccttcgaccatctggcgaatggcttcgggctgatcgccagcgggttcaaaacgggtgacgagttggaaatccgacataacgtacctcgtgtagtcaccccagactcgaaaccgccagggacgaaatagctcagcaacccgcgaatgatcatcgcaggttgcaggaaaaaaccatgatagctgtagaagtggtgccgaatgtgacgggtttcaagaccatcgtcctacgtgccgtgccggatcaatgttgcaataagactaacggtcagcaaataaaccgaaaaacttggccgaaaagccatttcggctgtcgccctcggcagtgatgggctctatactagctccccgtttgtgcaccgctctagtgcattcggctggagcgcgacacgtccctcctaccccccatagagctgccgcaaaaatgagcctgttctccgctgtcgaaatggcaccacgcgatcctatcctgggcctcaacgaagcattcaacgccgatacacgaaccaccaaggtcaaccttggcgtgggcgtttactgcaacgaggaggggaagattccactcttgcgtgccgttgccgaagcggaagccattcgcgtggcacaacacgccgcccgtggctacctgccgatcgatggcatcgcagcctacgacaaggctgtgcaaaccctgctgttcggcgctgaatcgccactgctgaacgctggccgcgtcaccaccgtacaagcggtcggcggcaccggcgcactgaaaatcggcgctgacttcctcaagcaactgctgcccaacgctgtcgtcgccatcagcgacccgagctgggaaaaccaccgcgccctgttcgaaaccgccggtttcccggtgcagaactaccgctactatgacgccgccacccacgacgtgaaccgtgccggcctgctcgaagacctcaacgccctgccgccacagtccatcgtggtgctgcacgcctgctgccacaacccgaccggcgtcgacctgagcccggccgactggcagaacgtgctggacgtggtcaaggccaagaacctggtgccgttcctcgacatggcctaccagggctttggcgacggcatccacgaagacgcagcagcggtgcgcctgttcgctgaatcgggcctgaccttctttgtgtccagctcgttctccaagtcgttctccctgtatggcgaacgggtgggcgcactgtccatcgtcggcgagtccaaggaagaaagcgcgcgcatcctgtcccaggtcaagcgtgtgatccgcaccaactactccaacccgcccacccacggcgcggcgattgttgccgcagtgctgaacagccctgagctgcgcgcccagtgggaagccgaactggccgaaatgcgcctgcgcatccgtggcatgcgcgagcagatggtcgcaaccctggccaaggctgctccgggccacgacttcagcttcgtcggccgccagcgcgggatgttctcctactctggcctgaccgttgagcaagtcacccgcttgcgcagcgaattcggcatctacgcactggataccgggcgtatctgtgtggcggcgttgaaccagtcgaacattgatgcagtcacaaaggcaatcgttcaggtgctgtaaacctgcagccgttgcaccagaaggggaagccgatggcttcccctttttcgtctccagcccctagactgaacctcgaccgcccctttgctgtgagtaccttatgagaaacgatgacctggacctgcgtgccgaccgcgacgaactggaccacttcaccccgcgcgcaccgcaagtaaagcgccagaagagcctggtgctgcaagtggcgctcggtgtgttcctcggtggcctggcgctgtggctggtgcaattgggcgcgactgcaatcatggcaaaactggccatgggcaccctgcaattcggcggctgataccaatcacaatctaggaagcaaccagatcgcgttcctccaacagctttacaaagctgttgaggctctgcgacaccgtcccgcggcgccagatcagccaggtattcaaaatccggaagttatccgtcagcggccacacactcaccgctgccgaccccggcatgctctccagcatgctacgcggcatcagcgccagcccggcgccggcgctgacgcaggcgagcatgccgtggtaggactcgatctcgaaaatcttgcccggcaccgcgccgtcctgtgagaaccagcgctcaaaatggtgccgatacgagcagttggagcggaaggtgtagatgttctcgccattcacatcctgaccacgcttgatcggcgcatgatgcagcggcgcaatcaccaccatctcttcttcaaacaccaccaccccctccagcgtggcatgcagcaccggcccatcgacaaacgccgccgccagccgtcccgataacaccccttcgatcatcgtgcccgacggtccggtgctcaggtccagctcgaccttggtgtgcttctggttgtacgccgcgagcaacgccgggatacgcaccgccgccgtgctttccagcgaaccgagggcaaacgcgccctggggttcctcccccgccacggtcgcgcgggcttcctgcaccaggtcgaggatgcgccgcgcatagccgaggaaattccagcccgccggcgacaggcgcaagcggcttttctcgcggataaacaattccacgcccaggtcctgctccagctgcttgatacgcgtggtcaggttcgacggcacgcggtgaatcaactgcgcggcggcgctgatgctgccttgctcggcaacggccttgaagatttccagctgcaccaggtccaagtcattctccaatcgtgaatgtattgcttaatattattcagtttccagaaaagagctagccccgtaggctgaacccaatctcatcattcagcaggacggtgccatgaacgcgactacccacgccctctcgatcaacccggccaccggcgaaacggtcggcagctacccgtatgaaaccgcgcagcaactggacgccgccctcgagcgcgccaccctcgccttccgcacctggcgccgccagccggtcagccagcgcgccgagttgctgctgagcctggccagcgctctgcgcgaacaagccgaagacatggcgcagatgatcaccctggaaatgggcaaacccatcgcccaggcccgtgccgaaatcgaaaagtgcgcgcagctcagcgagtggtacgccgcccacggcccggccatgctcgccccggaaccgaccctggtggacaacggcagcgcccagatcgaataccgcccgctgggcccgatcttcgccgtgatgccgtggaacttcccggtgtggcaagtcctgcgtggcgccgtaccgaccatgctggccggcaacacctacgtgctcaaacacgcgccgaatgtgatgggcagcgcttacctgatccaacaggcgttccgcaaagccggtttcgacgaaggcctgtttgaagtggccaacgtgaccaacgacggtgtgtccaaggccatcgccgacccacgcatcgccgccgtcaccctcaccggcagcgtgcgcgccggtatcgccatcggctcccaggccggcgccgcgttgaaaaaatgcgtgctggaactgggcggttccgacccgttcatcgtgctcaacgacgccgacctcgacgccgctgtgcaagccgccctgatcggccgcttccagaacagcggccaggtctgcgccgctgccaagcgcctgatcatcgaggacggcgtggtggaagccttcaccgccaaattcctcgaagccagccgcgccatggtcatgggcgacccgacttcagccgccacctacatcggcccgatggcccgcttcgacctgcgcgacgagttgcacggccaggtccaggccaccctggaagaaggtgcgaccctgctgctgggcggccataaagtacccggcgccggcaattactatgcgccgaccgtactggccaacgtcaccgaccagatgacctcgttcaaacaggaactgttcggccccgtagcctcgatcatcaccgcccgcgacgccgaccatgcggtggccctggcgaatgacagcgagttcggccttaccgcgagcatcttcaccagcgacccggcgaaggcgcgggacatcgccaatcagctggaaaccggcggcatcttcgtcaacgccttcagtgtttcagaccctcgggtggcgtttggtgggatcaagaagagtggcttcgggcgtgagctgtcgcacttcggcgtacgggagttctgcaatgcccagaccgtgtggctggatcgcaaataaatcagagcagcaccagccccgggccaagcccgctcaccacaggaatctggtcgcctgaaagtgtttatgcacgaatatgccgccgcacacactgcaccaacccctccagcgcctgcgacttcactggcgcgagcacacagaccgtgtgttcgcgctggtcctccttcaccgtcagggtgtaatgcacctggcccgggttaccgggcgcgggttcactgctttgcggcagctgaaagaagtcgcacgcctcgaccaactgccgcaactcctgctggtcctgctcgggcaggctgtccaactcaactgtacgcggcttggccaggcccggaaaaaaagcaggcccgccgttttccttcagcgaaatttgcatggctgttcctcacgtcagaccgaaataccgaccgccttccagccctccttgaccgccttctgctcatccttgttcgcaccgtagagtcgaccggcaacatcgtaggtaatgcgcgcaaagcgcaaaaaccctgagttcggtcgcaaccgcgcatcgcgcaatgcgtcgtaccagatgcgcccggcacgctcccaggcaaacccgccgatgtttgtcgccacctggtagaacgcatggttgggaatgccggaattgatatgcaccccgccattgtcctcgtaggtctgcacaaaatcatccatgtgcccgggctgagggtccttgcccagcagcttgtcgttaaacgcggtgccaggggctttcatcgagcgcagcgcggtgcctttgatctttttggtaaacagccctttgccgatcagccaatcggcgtcctcggccttttgcttcaacgcatactgcttgatcaacgaaccgaacacgtccgacagcgactcgttcaacgccccggactggttgaaatacatcagcttggcctcatcctcggtgacaccgtgggccagttcatggccaatcacgtcgagggctaccgtaaagcggttgaacagctcgccgtccccatcaccgaacaccatctgggtcgagttccagaacgcattgttgtagttctggccaaagtgcacggtagcgtccagggccatgccggcatcgtcgatggagttgcgatcgaacacctggtcgaaaaaatcgaaagtggcgcccaagccatcataggcctcgtccaccgccgcgtcgccactgatgggctggccttcgccacggatcagtttgcccggcaggctgtcggtgccctcggcgctgtagatcgaacgccgtttgtcggcgcccatcgccagcgccaggtgcgccggccccttggcaggcaccgcgaccatgcgcagtgagcggaacgtgctgtccttggcgcgagtacgcagcgcgacatcccgttgcgctttgtcaccgttacgcgcgatctggtcgagcatatacggcggaatcaggcagaaaatcgggtttcggtaatggcgatcacacattggctggctccttgttggcgtgtgctgaacgtccgggtgaccgtttgaggatagcccccaggggttggtgcgcatgatcaattgtcattaacctatgttgcagtcgtgtttatccaaggaggactgaccgatgcccgcacgtaaaaccaaaatcgacctcgcctaccgcccccggctcgccgacatgcgcccgttgatcgcgccgagccccacgctgctggaggccagggcagcgacaccccgcgtcaccccggccaaagacttgaaggaccgaagtggctacgcagaagactttctcggcagcttcggggtgccctggcccacgctggaggaggcgttgacgagtgatgcccagaagcgcctggactacacacacttctccatcacgatgtcacgtgccaagcgcctcgcgctgtatgtgggcgtgaacatcgatggcgggcaacatgtggacatcatccgcagcaacgacacctgggcttacgatggccgcctgccggtcgacgcccaagtcggcgaagcgctgtatgccagcaacggcctcgatcgcggccacctggtgcgccgccaggaccccaattggggtgatgtggcgcaaaccgccaacctcgacaccttccacttcaccaactgctcaccgcagatgagcgggttcaaccagaagacctggctggaactcgaagactacatcctcgacaacacccagcgctggaaagcccgggccacggtgttcagcggcccggtgttcgccgacgacgaccgcgtgtaccggggcgtgcagatccccaaggcgttctggaaggtggtcgcctacctcagcgatgacggcaaaccttcggccagcgcctacatgatcgatcagagccgcgaactgggccagttggagctggtgttcggccagctgcgcacctaccagcgcagtgtgatccagatcgagcgcctgaccggcatccgcttcggcaacctggccgactacgacggcttcagcaacgaagaacgcgccaccggcacgcggattgaagcgctgatccaggggcctgaagacattcgtctttgatcaacgcttcacaggttgatccgcgttgacaactgacactcaccacgacgcgaggcgagccgctcttgatctggctgatacgattccatcaagggtgaacactgcatccgtggcgagcgccgtacccaggcgagtgaacgggctagccatcattgcgcgttgatgtaatgaaactgtgcctgcgttttctcgactgccgcacgcacggcgtctttctgcgcctcggtgcccgagtagtaaatctgcatacccttcaagttttgcccttcgactgctttgccgatcaccgcaacatcaaccggcgtgctggcaccgataatcaaaaagaacacatcgcccaagcgtttggcatcgagcagctctgccctgaggtgcgcggcattttgctcacccgccatggaaatcgccagggtatcgccgaacataccgcttttggggatgctcatcgtatgcagccggagcttgtccgaccccgccggcatcgacttgacataggcggaggcggcctcatcaagaatctgctgttcagatttaccctgggtggcacaaccgacgagagcggcggcgagggcgagcgcgacgaataatttcactgtctattccttgtgataaagcgatccattggctgcgcatcataggagccccaccttcaaagagccaccgttggtttcacggcctcccgctcgaccgcgtgatcgactaccataccgcgccggttcccaaacgggactaatagggaatccgaggcacggtacacccgcgccaatcggaactgcccccgcaactgtaggtgctgagcctgctcctcgatgccactggacctcgtccgggaaggctggagcgtggcgacgacgcatcagtcaggagacctgccggcccaagctcaatcactaaccggcggggtgtccgggaaggacattcttgcctgtcgcgcccccggcgcccgagagtggatttccgaatggcacgtacgcatcactcggagatcgccccatgctgccacgcgttatcgccctgcttacaggtgttggcttctgtgccctggcccacgccgcgcccactcactacccgctgaccgtggaaaactgcggcagcccgatcaccttcccgcaagcccccgcccgcagcgtgactatcggccaggccgccaccgagatgctctacgccctgggcgtcggcgataaagtggtcggcacctcgctgtggttcaacagcgtgttgccgcagtacaaggcgcagaacgacaccatcgagcgcctggccaacaacgagccgagcttcgaagccgtgatcgccaagcgcccgcaactggtggccgccgagctggaatgggtggtggggccgcaaggcgtggtcggcacccgcgagcagttccatgaactgaagattcccacctacctgctaccctccgactgcgaaggcaaggacaacctggtgggcgccgacggcacgcggctggagccgtttcgcatcgagaccatttataaaagcatcagccaactggcgcagatcttcgacgtacaggatcgcggccagcagttgaacgatgaactcaaggcgcgcctggccaagtccgtcgccaccgtgcagggcaaaggcctcaagcaggccagtgcgctggtgtggttttccagtgccgagatggccagcgacccgtacgtggccggccacaaaggcatccccgaattcatgctgcaaaccctcggcctgtctaacgtggtgcagtccgatgaagagtggcctgccgtcggttgggaaaccatcgccaaggccaacccgaccttcctcgtcatcgcccgcatggaccgccgccgctacccggccgacgaccatgaaaagaaactggccttcctgcgcagcgacccggtcacgcgcaacatggacgcggtgaaaaacaaccgcatcatcatcctcgacgccttggcgttgcaggctagcatccgcatgttcgacggccttgaacaactggccacggccatcgacggctacgacctgccaaaatgatgcgcaccctgctcgccctggccctgctcctgattgccgtgctcgccggcgtggccatcggcgaaaccgccatctcgccgcaggtggtgctccaggtactcgccaacaaactgtggggcgccggctacgtgctcgaccccatcgatgaaggcgtggtgtggaactaccgcctcacccgcgccctggtcgctgcggcctgcggtgccgggctggcgacctgcggggtgatcctgcaatcgctgttgcgcaacccgctggccgatccctacctgctgggcatcagcgccggcgcttcgaccggtgcggtgctggtggcgttgatgggggtgggcggcggcttggtgtcgttgtcggcgggcgcatttgtcggcgcgatggcggcgtttgccctggtaatcctgttggcacgggccagcggttcggccagtggcaccgggcagatcatcctcgccggcattgccggctcgcagctgttcaatgcgctcaccgcgttcctgatcaccaagtcggccagttccgaacaggcccgcggcattatgttctggctgctcggcaacctcagcggcgtgcgctggccctcggtgtggctggcggtgccggtggccgtcgtcggcttggctgtgtgcctgtggcaccggcgcgcgctggatgcgtttacctttggcagcgactcggcggcgtccctcggcatcccggtgcgtcgcgtgcagtttgtgctggtgggctgcgcggcgctggtgacggcggtgatggtgtcgattgtcggctctatcggctttgtcgggctggtgattccccacgccgtgcgcctgttgcttggcaccgggcactcacgcctgctgccggcgagtgccttgggtggtgcgttgttcctgattgcggcggatgtgctatcgcgcacgctgatcaagggccaggtgattccggtcggtgtggtcaccgcgctggtcggtgcgccggtgtttgcgctgatcctgatcggccggaggaatgcgcgatgagcgtattgagctgccgcgggctgggcttcaaggtgcgcgaggccgagttgctgcgggatgttcatctggacgtgcagttgggtgaaaccctcgggattgtcggaccgaacggctcaggtaaatccaccttgctcaagctgctcgccggcttgcgtgcacccgcatccggcgaagtgctgctgggcggccagcgcctgggcacgctgtcccgccgcgccatcgcccagcaactggcggtggtggagcaacaggctgacaccgacgacgccatccgcgtgttcgacgccgtggccctgggccgtacgccatggttgtcggcgctgagcccgtggtccgttgaggacgacgccatcgtgaagcaagccctgcaggacgtcgacgccacccacctgagccaccgcgcctggcgcagcctctcgggcggtgaacgccagcgcgtgcacatcgcccgcgcattggcgcaacggccgcagattctgttgctggatgagccgaccaatcacctggatatccagcatcagctggcgatcttgaagggtgtgcaggcgctgcccgtgaccaccttgattgcgttgcatgaccttaaccaggcgctgacctgtgaccgcctggcagtgttggatcgcgggcggttggtggccctgggcaaaccgctggaagtactgacgccacaacggttgcaggagacgttcggggtgcaggcgcattacctgacggacccgcttgatggggcgaagatcctgcggctgcgccccgcttaatactggaatagcggtttatcgtggcgagcgggcttgccccgcgttgggctgcgaagcagccccaataaagccgctgcattcctccaggtcgaaccgaggcgcagggtttcagggctgcttcgcagcccaacgcggggcaagcccgctcgccacaacaagcccacttgccacaaaagcccgctcgccacaggcctacaggaactgctgcatatgcgccgtccgccagaccgggtctgcttccacatctacgacctcgaagccctgccgaacccagaactcaatcgcccccggcaaaaacgggtgggtatgcaagtacatcacctcaaccccatccgcctgcgccatcgcttccaacgcacggtacaactgccccgccaagccaaaacgacgaaactccggcgctacgaacaagcgcaccacctccaccgtcttgcggccttggtaatccagttgagggaaacgcccgtcatagggcagatacccgatggccgcaacaatttcgccaccgttgcgagcgatcaaaaagcggccttcgccctgaagataaatcgacgcaaagcgcgcgaggtcatccggcatgccggcgtcgtgaagcttggggaacagctccgcacgcgcctgcagcacaaagtccagcacctgtggcacatcccccattgcaactggccggatgatcactggcgcaactcacacaccgcattgcccttcatgcccgacgcatgcacgctcacatggcgcaccgtaaaaccgggcttcaccaccagcttcttctcttcccaggtgccgccgttttcaacctggtaaccgatggcgccatcggcttgccaggtcaggcgcagggtgtacacgccgttatgatcgagtgtttgatgaatcggcgtatcgatgatcggcttggccttattgaacgtacgcaggttgaaaatccgctgatccgtaccggctggcgaatagctggagagaaacaacgtatcgtcttcggccgcatcctcggcggccgccaggatcaccgacggcacccacttctcgccacggtcctgggtgtcggtgacgaccttgcaggtcaactggcccttgccggtgacgttctggcgccagcccgtttcgtaaaaaccgtagggcacatcgaagcgcagggtcttctcggtgacttgctcgcagccggccaacaggtagagcgctgataaagcgatgactccttttagaaacttcacgtgctgtccttggcttgaataggtggggccgagagattacccgcgcagtcagataaagtggatagatttagcgggctgccgtgtcgtgatatacctgcgcccgtcattgatttcaaacccgacgggttaaaggagatgagcagaaaatgactgaactacccatggctgacgcgcgccagaatgataaaagccgcaaggtcatccagaccgctatcaaagaacgaaacctggcaggcgcggcaaacaacaccaagtggaacgaactgattacacacatgcgccagcgctcggggtgggtaccgtcttatcgctcaaaatacatcacaggccatatctcgggatgggatgtggaatggttttaccacctacctttcccttttgcgtatgtcgaatggctcgacatcggcttgtggcaagaagcgccttcgttaggcgtattactgccacgaacgtatattgaccataccgaggaaatctctcaggttatctcgcagataggcttcgaatttgaagtgaaagccgacgtactgagaatttggggataccttccaaaatccttcgatgactttccgccggcataacgtacagcggcggatcctgcggctacgcccgaactaacgccttgccactgctggccctgctcagccaccgtcactgtagtgagcgggcttgccccgcgctgggtggcgaagccgccccaaacccaggcgcctcggtgtgcctggggtcccgttgcgaacctggcgcggggcaagcccgctcactacaagttacagtcggcatggcggtttgaatgatcatctccctagtagggcactgatccactggtggctataagcaagcacgcgcccccccatcaccaccggaaaatgaataaacccatgcgccgcctccggcaacagatgcgcctcagcccccggccaccgctcagcgatcaacagcgtgtcatccttcaacgggtccaacgcccccacaaacatcaacgccggtggcaagccttcgaagtcgccatacaacggcgataacggcggctgccgacgctcatcatcgctcaggcccggcgtcagcatgcgcaacgcctcgaccatgcctggcccgtccagcaacaaggtgtccggccccgccgcacgtacgctcggggtgccggtcaagtcgtacacgccgtaatacaacaccgccccgcacacgcgctggagcagttgcggccattgcttcaacgccagcaacgtcgccgccgccaaatgcccaccggccgattcgccgaccacgaacaccggcaggccggcaaattcatcggccgtgagcaaccaacgcgccgccgccaggcaatcgtccatcagcccttcgaccggcgtgtcgaccgccaaccgataatccaccgacaccaccgccacctcgcaggcgttgaccatgcccaggttgaggtcgtcatccatctgcgcattgccgattacccaaccgccaccgtggatatccagcaccacacccttgggcttgccgctcggccgcaggatgcgcacgggtacggagtcaaccaccttgcattcagcagccggcgctttcttgagcatttggctggtgcgcaacagcgcctggatcaggcgcggtgtgacgcgattacggatcttgaagcgcggcatccaggcaagcttctggttgaagcgacgcatctcggccagttccggctcactggcgggccagggtgtataggccatcaacggttattccgcaggatcgagaagttcagcgccgccgccacgcacagccaggcaaggtaggggaacaggatcaagccggtgatcaaatccagttgcactgccagtaccaccatggtcgccacggtcaaccacagcaccgcaataatcaccatcccggccaggatgcgatgggcgccgaagaacaccggcgtccacaaggtgttcaaggcgatctgcgcggcccacaaggccagcaccatttggctgcccgggatgaggctgaggcgataaccggcccaggccagcaacaggtaaataatcgtccacgccaccgggaacaaccagttgggtggggtgaagctgggtttgaccagggattcgtaccaggctcccggcttgaagatgatgccggtactggcagcggcggcgcaggcgagcaggaagatgaagaaggtcatgggcggtccttggctgtcgtcagcggttgtgaggggaaggcgttgtccgtgctttatcaatgactcaaacgctcgcgcaaaaattcaatcctgcgtggcaaatcgcatacaacagcgctcctacttcatgtcatcaaaattcgctaaggtgcttcgacaccctaacctgtttgctcaccagcgagatcgcctgccttgacccatgcctccaccccaccctggaaggtgttcctgatcttcctgcgcctgggcctcacctgcttcggcggcccgattgcacacttgggttattttcgcgaagagttcgtggcacgccgccgctggttgagcgagcgcagttacgcggagctggtcgcactgtgccaattcctccccggaccggccagcagccaggtgggcattgcgctcggtttgtcacgggcgggttacggcggcgcattggctgcctgggccgggttcaccttaccgtcggccctcatcctgatcctgttcgccctgggcattgcccaccacggctcggtgatccctgcgggggcgttgcatggcctcaaggtggttgcggtggccgtagtggcacaggcggtgtggggcatggcgcgcaacctgtgccgaggcgtcgcccacgtcatgctgatgctgatagcggccggtgtggccctgctggaaccctccgcctgggcccaggtcagtgtgatcgccgccgcaggcctggccggcgtgatgttgttcaaacccgagtcgagtgccggacatgacgcgctgccgatccccctcagccgccgagcgggggcgctgtggctgggcgctttttttggggtattggtgggcttgccgatcctggccgactggctgcccaacaccaccctggcgctgctggatgccttctaccgcaccggttcgctggtattcggtggcggccacgtggtgttgcccctgctgcaggccgaggtggtgccaacgcactgggtgagcaacgacgtgttccttgccggttacggtgccacccaagccgtgcccgggccgctctttacctttgccgccttcctcggtgcctcgatgaaccagccacccaccggctggctgggcggcgtggtcgccctgctggcgatcttcgccccgtcgtttctgctgatctttggcgccttgcccttctgggccagcctgcgccgcagcccacgcacccaggccgcactggtcggagtgaacgcagcggtggtaggcctgctgctggcggcgctgtatcagccggtatggaccagcgcgatagtgaccgggtacgaccttggcctggcgctgctcgcattcatcgccctgctagtctggaagctaccgccgtggctggtggtggctggcagtgcagcgctgggatgcctattgggataaccccggctccacaattcgcagccatggccagcgcgcctgataactgcgggccttctgcacaaacaacgccggctccggatgcagcgggttgatgcgcaacacgccctgctccacatcctccaacccataaggcgcatacacctcgcccgtggcaatctccaggccgatgcatgtgcccgccaccaggtaacggtcaatcccctgcctggccgtgtgcaactgcgggtaaggccggccaaagcgctcgccgtaccacagatgcacccgcgcctggttcttcacctcgacattgacgcccaggtcttggaacaagcgctcggccgcacggatgactgcgtcttcagcctcgtaggacaggtcggtatcgaagtagaaaacgtcgtagtcctttacgccctgggccgccggcaaattcgagtgatgattccacaccgcctggaacaggcagcccgccgtgaggaagcactggtccacgcccaggtcgggcaggcgcgcggtgatttcggcgttgatggggttggccatggccaggttgagcagggtttcgacagtcaatgtcatgggctctccgttatccgtgacgcgctcgaacggcagaggttacaccacggcgtggagggtttcgtgacccgcgcttttcgatctcacgcgggatcagcgtaaaccaggacttgcggcagcaccgcccttgcccccccttcaatgagaagcttcagcctcggtcagcggctggcgcttggcccactccatcagttccagattgggaatgtgaataacgccatccacacgaataatgtaattgggccaaggaatatccacccccgccctctgcaaattggcaatgcgccccgccgcatggcgatcgaccttgtagcaatcgaacgcatactttgaagtctcgtccttggaattgtattgccggtacttcaccacaacggtgcattttttctgcggcaggtccgtaacctcgctgagttcagcaacgctcgcagggatcagcagcccgttcgttgcattcaccaggacctgctcgctcgccttgatcagcctatgccctttcgggatgttgaacagactcatgtccgggcttttgtcagcggcggtttcaagcaccagccccgtcaggatggccgcacgattgccgacattcgtcaccaacacctccatccggtcaaaatcgctgtaagccagcgtgatgtccagttttgaatagtcccctttcaaccaactccaggcgggaggaacaaccacagaggctatagatacaagggccactggcagtccgaaaagcagactcaaccgttccagcttgcccttagtcaacttcttcactcgattccctcttacacataggctgatgtcacggccagatagtggcacttaaccatcatgccatgccttggctcgaccatcagccgcctgagaggggtgttttcacgcctgcaactcacccgcccgatgcgccgccgcgtcgtcgtacaccacatacaacgactcggcgacttggctcttgatggccttggtggactcaaggcccagcacaaaaccctcggccttgccgccggcgcgattgagttcttcaggggtggcggcgccggtgatggcgtcgaacagcttggtggcatgggggctaacgcccttgggcaggctgatctggtcgatggacatgggcgataccttaaaagagagaattcggtagcgcgtgcaaccactgccggggtggcatggtagaccggctggctgagaaagggggctttttcatgaccctccccacaccaccgtgatagcgctaagctacatccccctcccgccccgcaggcccagcaccatgaccctctcccccgacttcaccccctgggcctcgttgctcggcggtgcactgatcggcctcagcgccggcctgttcatcctgctcaatgggcgcatcgccggcatcagcggcctgctcggcagcctgctggccaaacacgctgaaggccgcgctgaaaagggcctgttcctgctcggcctgctcgcctcgccctggctgtggtcactgttcgccagcttgcccggcgcgtcgatccaggccggtggcgcagcgttggtgctggcggggctgctggtaggcctcggcacccgctacggcgccggctgcaccagtgggcacgggatctgcgggctgtcgcgcctgtcgctgcgctcgctggtggcggtggcgtgcttcatgggcagcgggtttgcggctgtctacctcatccgccatctgatcggagcctgagcatgcgcaaactgaccgccttgatcgccggcctgatcttcggcctggggctgtacctcagcggcatgaccaacccggccaaggtgctcgggtttctcgacctggccggcgaatgggacccgtccctggcgctggtcatgctcggcgcgctcgccgtcagcagcgtgttcttctttttcgccaggcagcgccgcaccgcgttgctgggcgcgccgatgcagatgccgaccaagcgcaccctcgaccgccggctggtgctcggcagtgtggtgtttggtgttggctgggggatcgccgggctgtgccccgggccggcggtggcgttgttgctgaccgggcaatggcaggtaggagtgttcgtgctggccatggcgttggggatgtggctgtttgagcggattgaggcgcgcagattggccaaggcttgaggcgcgggcgggaggttgtgctttatctccacccgcccccggcctacattgaacgccttatcgatcaaccccgaggtcagcccccatggcacgcatcgtccggattcacgcctacggcgacgccagcgtcttgaaactcgaagacgtcgacgtccccgcccccgccgccgatgaagtccaaatcgacgtcaaagccttcggcctcaaccgcgccgaagtgatgttccgcaaccacgcctacctgcaagaagccgaattccccagccgcctgggctacgaagcggccggtgtggtagtcgcggtcggcgccgatgtcagtgacctgcaggtgggcgacgccgtcagcgtcatcccaccgctggacatcgcccgctggggcacctacggcgaagtcgccaacgtgcccgcccacctcaccgtcaaacacccgcaaaccctcagcttcgtacaagccgccgcgtgctggatgcaatacgtcaccgcctggggtgccctggtggaacaggccaaactgacccagggcgacaccgtactggtcaccgccgcctccagcagcgtcgccctcgccgccttccagatcgcccgcagcgtcggcgccaccgccatcggcgtgacccgcacccgcgccaaacaacaagccctgctcgacgccggcgcccaccacgtcatcgtcagcgacgaagaagacctggtggaacgcgtgatgcaactcacccacgaccaaggcgcccgcgtggtgttcgacccgatcggcgggccgggttttgaagccctcacccaaagcatggcccagggcggaatcttgctggaatacggcgcactgagtgccgagcccacgccgtttccgttgtttaccgtattgggcaaatgtttgacgctcaaggggtatctgtacgccgagatcgtcgccaaaccggcggcgttggcgcgggccaaggcgttcattctggacgggctggcctcgggcgcgttggcgccggtgattgcgaagacatttgcgttggatgaggtgcaggaggcgcatcgttttttggaggcgaaccagcaggtgggcaaggtggtggtgacggtgtgagggcggtgtcctaggacatttcccaaagcagggcagtggcttgcccgattgcctacgcctgcgtcagaatccgccggcttgtgcgctggggtggtggaatctatggttgcgcggtcgctgaatttttcggtgatcgggtttagtagcccggatcggttatctgaatgtgcatgagcttcatcagtcagacatcacgtctgtgcttgatggcggctgtgcgcagggcgtcctcggacgcgccggctttagatatccaccggtctactaacctgcgtacagctgccacccactcgtttagtagcggggaggtggtggcccaagtcaggatatctttatgcctcacgtcatgcaggattcaaccgtgctcttctgcgttgctccagacgcaagcaatgaagccctcattgccaatagttacgaaaccttcgcctctgtcagtacccttctgctcgatctatccgaagatctgagcggcaaacatcgagatattgcactggctatccaccaattgagtgaactgggcgtgttactcacagccaagctccttgatcgtgaggcgccctccgcgggctgaccatagctatccagaagacgaggcaggtcagtggctgagtcgaagtatgaaaaatgggggcggattgatccatgaagaatcaatttgtccccttttcagtggactcaaaacggcctttgatgaatggctactctcggccaaaagctgacgatggctacaggcagaaatcgacccactgctgccgtctagatcagacgtgatctttgttggagcgggcttacccgcaaagaggctacttgagcaacacacatactcttcgagcgatgtcatctgcgccatcgggaatgtccactgaaatgcctaaatagtgttcaaggtgcagggtgagcgtgtgttcatctaccaacagatcccagtagcgctgatcttgaccatcgagcctctctttccagcaacctcccagcccttgctcaagaacccgggccacgtcctcgaaaagcgtccagtcggcttcttctgatacttcaatcctcaccatgcgtcacctcaccaccaaaagtcccccgattctggtggctcctgcgaatggtcgcaatgggtcgaaagtcgtcaatcgcgaagcgcagctattggccgtgagctgcggtacgcaactgaaagcttccggcccaaaaaagcggctccgaatcgccgaatgaaggctaagaaacctgatcacctatcactatgaggggttctccgaaggttacatcagatagccgagtagcctcagctaatgcccgtaaaggggcaggcaaatcgaaaagtgtcagtggattcagtgggcggcattgcagctcataccccctcaaggcctggcgtgaatcgcgatgaacgtctgaccagtcgtacgcgaagaacccacgtttggcaaattcaacgaaagcgtttacgccagccctggcagtgacccgatctacatcggacacctccggcaatgaaaggacaaattcttcggagttttcgacggagggcattgcggaatcaggaaccggccccggcccacccgtagtgaagagcgcaacctgcccgagggcgtcggtggcgacccatccaacatcaaagtcctggagaacgaagggagccaccatttgcacctactttataaaaagggacgagttgatttcctaactctacttcccagcccggagtgtgtaaaagcgcgtcggcaaactcttaaagcaggaagaaattcgacgagttcattatcccagctttaaacatccggttctggccgattgctgcccgctacgacaggcagaaatcggccagaagcagcacgtcagcacgagcagaaatcgccagactattcaaccggtagagacaacagactagacactgcgctggcagaaagactgtctcagataaggcgaggccataagttggtggcaatacgctttgtctgtgtacgccatcacaatccgcacccctttgcgataggctcaacgacaagtgttgaaggcgctttccctgtctgaatatcaactacctccaatgcgcaaccggatttaggagctgagtgggtcacttggtagatcccccccgcattagggacgaagctactgatgctcaaacaactcctatggattaacggctgatccgtgttctcacgctccttgattcctgagctgagtgcgctcaggtaaatgcgccgatcaggctggattagaaatcgattcttttcaggttctgacggtgaaacactacctagcacaccggtctctttcgtgtcttggcagtgagcatcgtagtaggcccaatacacttggctgcctccagacatgaattcgtttttcccccaatgagcatcaagggtggcgtgcggcgcattcggtgccggttgctggtagtgaccaacacaaccagtcagaaaaatcgcacagcagataagtatggatttagtcaacttcacaccaacctagaaaaatccagaaatggggacatctggtccgttatcggccagtctggtttaaacaagagagttcgtctcaaacgttgacgatgttatgcggacgattcagatggggccaggctgtgtgaaaacacatttttagaacgattcggccatgggggcattcgaccaggttttgaggcaacatatgatctctaagaatccagcagctcgacgcagctcgcaaaccaaatcaggaagaatgaatgccttcccgtcgccgcctcagtagtgtctgtcaaagtattgcgcatcacgctgcgagcagtctgtcgtacgtacacccacatctgttgcaagccctcaaagcgaccggggaatcgatcgcgacggtggatctaatgagtgcgaccccatacccgaaggagcttctcagtcatccccaccttcccaccgccctctcttcactacgtgatcgttttgaacagattttgaaatctgaaggatttttaataaccgacctcaacgaggccaagctatttttcaaacctgatcgccaataccgtgacgagtattgttgcgaatgccacgcaaggttgtctcattcaagcggccgtaaatactttgcggcagtcaattgcatgggtaaatccattgttccccagcttgccaatatctgaccaatcccctccggtaatgtcttcaatccagatgaaaagcgagctttaaggccaaaagtcggaatacgccgaggatgatctaagcttttgttcgtctagatcgtatcgggggcgatcatgaagcgatttattgaaggtgaggctcggacgcaagtcaccttgctgccggagtgtctggacgattacgtagccgaagaatggagaattggggccagcccacgttatcaataatggtgtgcctccccctattccccctgaccaacccgcttgctgtgggacttgttgttgctgaaattgacatcgccggtacaaccgcgatctgacccactttgcgtcggctacggaatgcacctgttttcttgcggtctgtagcacaacgctgcaaaggactcgcgccatgtcgattcgccccacgctctgcctgttgatcctgccactatttgccggctgccagtttttcccacagacccattacttcaccgcccccgacaacgagccgaaccccgcctgggtacgcatcgtcaatttcacgcagcacgccgatatctaccaatacgaaaacggtatgcgctcgggcggtgtcatccgcagcgggccgctgcccttcatccatacgcaggatcagggcatgcctaaagccgggcagcatttgacgtacgactattatgaaacccgcgtgcggcccggcatcggaacccatgtggggctgttctgggaggggccgcgcactcaatcctgttttgtcacggtgcagttcacgccgcaggctgggcgttactatcagttcagcctgacgtcgggctccagcggcacctgcacggccaggccctcgctgatcgagcgcgataaagcgggggcgggatggcatctcacgcctaatccgcaggtgacttactcgcctgtcggccccaccgccaaaacccactacaacaatagtcgcttcgaggacccggattaccagccacctcccggtctctatccggggatgtagggatcagcgaccaacgccagcaactcattcaccagttcaacggcttcctcctgatagccctcgcggagaattggagaattggggtcagaccacgttttcaagaatgctggtctgcccccaattccgttcaacacaaccgaccagaagtgaacactcgacactagagccaatggtttgagaaagtaccgatcagacaagctaccccgagcacagagggtttcatgcaatggattgttttcccacgctttgcactaaccgcctgatcctgacgccgcttcaattgactgatgcgacggcggtgcagcagttgttcccgcaatgggaggtcgtccggtatctggacaaccgcgtaccatggccatatccacctgatggcgggctgacttacgtgcgtgatgtagctctgcctgccatggcgtcagggcgagaatggcactggatgattcgcttgcgcgctgaacccgagtgcagcatcggcagcatcagcctgtttgaccaacctggcaaccatagaggcttctggctcgctccgcagtatcaggggaacggttacatgcgcgaagcgtgtaaggtcgtcaacgcttattggttcgaaacattattgcgcccggttatgcaggtgcccaaggccgccctcaaccacccttcacgcaagatctctcaacatgaaggaatgcgcatgatcgggacgcgggacggacattttgtctccgggcccatgcaggttgaaatatgggagatgtcgagaagcgagtggctcgctgcagagaatcaagcttgacctgcttcgtccatgtcagtgccggcggcaggggtgattgctgtcactcgcattaggcgcgggcccctcctcgcttcccacgtttgaaccgtctggcagcacggcttgcaacgcctcttacccatcggctggaactgaccgtcagacgtttcagtaaacgcatgcactggcctgcccggaatcgaaccgcgcgcaagacgcgacgcctgtcagcctcaggtcgcgcatccatcaggcatagcttggtagtggccagagccacttttgccccaatcgctacagcgacagccaggaagtacagccaacgatgattcttggcttgatcatgttgacccacaagcgcagacaattgcttcaaatagggcttagcagcagcaagccgcggaatgatgcattcgctcgccaatgccacggtttggctgccgatacgatcatccacaaggcccgcgggaccatccggtttcgccatgcaaaagtggtgggggacatactcgcaggtacttgagagcggcgatgactgcgaaatgtcgcccgataagtacttcaccggacatagcgtttgattgtagtcggcgatctctttgcgaatagcgattacatcctcatcgctcaggacccagcgactcgcggagtaaaaccctttggagtcattcggcgcgaactcgatgaattcgctggcttcaccttctttgatgttggtgaaggtccactgcgaatagcggctccactggcacgacttcaaatcatccagtccattggccttgcagtagtcgtcatagcgtctgatttggctcaacaagtagccgctggcgtcctggatgcctgacgtcgcctccttgagcatggcgttgtcctcgctggcaccgttgtctgctacgaagaacactgcagcgaccaatgccagcgggaaccagaaatggtcgtagatctggcggaaccgttcggtaaggttgaggttgtcatacgcgagaaccatgatgccccagccggtgatggcgcacagcatcaataggggaatcagcccaatctcactgccgagtttccccacgccatggatggtgtagcgcgttggcaggtaattgattgtcgggaataggccgaggcagctcaacacacctggtaggagcaagattcccaagtagataagtaggccctgcctcttgcccacggtataggctgtagctgccagcaatggaatcaccaacagtgacagcatcatcaggtagcccagcgtgatcaccattgcttgatcgggtgaccaatagctgccaatgattttcccagcggtgtcacgttcggtgaagcttgatgacacaacgtccaggccttccaaaatttggtgcaggttgtacgccgcgccatggaggaaggttacgtatgggtagaagaagttcgcgatggaaactggcattgacttaagtccttgaattactggcgcattccttggctatgggaagaataggggtcagaccacgttttcaataatggtagcctgccctctatttctgccagccacctcccagcctcaatccggggatgaagggatcagcgccagcaactcattcaccaatccaaaggcttcctgctgatagccctcgcgccagcgggctgagaaatcctccggcctgccctgctcttcccactcggccaacgccaggccattgataatttccagctcgaaccattggcgctgccaggcggcagcgtcggttaccagcgtggtgtcctgccacaggaactcggtgtgcgcgacaaattggctccacgcaaacagcccgtgtgaagccctttcgccctgcgcggtcaattgcgctttattcaccctcggtgccctcacgtttgcaattcaatccccactgaaatagcgccatgcccataacccgcgccgtggggtaaggcagtagaccctttgcgcaggcaagagaataagtgcgcaggagccttcggaccaccccacgattacacacgggggattaaggcgacggatttggtttaccacgtttacactggcgccttttgcgccactcactcaggcacgcttatcgacccccttacgaatggaatcgacaccatgctcacctccccgcgcccactcaaaccgctcatcggcctcacccttctcgccgccctcaccggctgcggcgcattgacggatgtgcgctccttctccacgccctacgccacgcccaccagcgctgaaaccgtgcgcctgcgtgtgatgagcgatggcatggtgcgcgccgtgcccaattccaactgcatcaacttccgcctgcccggcgcgggggtgatggtggccaaccgagagggctacgcagaccgcaacggcgaaagcctgggcatggcgcccgtgcagcggtcttcggaggccacggtgatgagtgaactgcgggtgccggccgggcagcccatcgcgtttcattacatcggcaatcgttgctacaacatgttcactttcgtgcccgaggcggggatggattacgaattggatgcagcgggtcgctataagtgcggggtgacgctcaagcgcatgttggtcggcaagactgagggcactcgggtgccgttgggtgagagcaagttgtgcaactggggcgataacttctgagccacgtctcgccctcagctgtgcaacggcaacgccaccccgaacaacacgaagaacccgccacagactttattgaaccgccgcccggtgcgcgccagccatggccgcacccggtgcgcggcgctggccaccaggtattcgaccacaaactccaccacggcgtaggtcagcgcgatgatggcggtctgcgtgatgatgtttctgtgggggtcgaggaagggtgggataaacgcggtgaacagcagcagcgccttggggtttgagagggccgagaccaacccttggcggaacagcgaccagcggcgcaggctggtggtagccggggtttccaggctgacgggggcggcgcgccacagcccgtagcccagccagatcaggtagagcccgccggcaatcttcaaggccgtaaacgcggtggccgaggcctggatcagtgcgcccaggcccagcgcacacagcgcaagcaccagggcaaagccgagcacgccgccgctgatggtgaacagggttctgcgactgccgtgcagcgcgccatgggtcagcgccagcaacgcattcgggcctggcaccacggatattccgcagcaggtgatcaggtagagcaaccaggtctcgaagggcatgatcaagtccgcaatgggtggttttggctgctatcttgcaaatgaacaacgaccgtgaaaagcgcataattcacgtcgcagccattcgattaacgaataaaggtcagcaccatgtcttccagcgatttgcagatcgattggctcaagtgcttcgtcgccgtggtggatgccggttcgctgtcgggggcggcccatgaggtgaaccgctcgcagtccgccgtcagcatgcagatgaaaaaactcgaggcggccctgggccggcccttgctcaaccgtggcccgcggcacctgcaactgaccgatgacggccagacgttgctgggctatgcccgtcgcatgctcgccctgcacgccgagacccaggcggcgttttacggcgaggcattgaccgggcgcatccgtctgggggttgccgaggactacgccgccaggtacctcacgccgctgctcaaacgttttgcgccgcgttatgcgggggtggacatcgagctgacctgtgaacagtcgaccgcgctgatcccgcgtgtgcgcagcggcgatcttgatcttgcgctggtgtccagggactcgccgcacacggggacgtttctgttcaaggagccgatggtgtgggtcggctccgcgcaattcgaactatggcgccgcgacccggtgcctatcgccgtctacgaaagcgaaagcctggcacggcggtatgcggtgaattcactggcgcaacagggccgccagttcaaggtggtgtacaacagctccagcctggccggccaactcgcggccgtggaaggtgggctggcgattgctgcgattacagagtgcaccgtgcagccatccttgcaggtcttgagcagcgaacatggcttgggcgctatcgaaccgatggaggtgtcgattctacgtagccgagcttcgcgcggatccaaggcggtcaacagcctgcatgggtttatcatcagtgcgcttagagctcaggcgtagccctggcgcgtcgcgctatctggacaccgaggtgatcccatagcagcctcgctgaagctcgacagctcctacaattgatctgcattcggagctatacatggccctgtccaaacgtgaaaccgttggtatcgaacgccaactggtcgctgcactgactgacgcctgcgaaacggcgaaggctgaaatcccggggtttgaatggctgacccacacggtcaactacgccgacttccctcaaagcctgcgcatcacctgggtcttcgacacccgcgccaataaagaccacgcggtggcgaccgggttggacgcacgcatccgcgaactcacagccgcggccctgcacgacgccgacatcccacccgtgccgttgccgcgctgcgttcaacttgactccgaagaagcctgccaaacccagcacggcggcaattggcgtttgcgcctgacccgctcagccaactagagcctggcgcccaactgctggataatgcctcgccctgctctccgcccgctgaaaaggaaatcccgccccatgaagttgccgctttccgctgccctgctcgcgtctgccctgctgtcgccttcgatggcccacgccgaagacgccgcactggtcgacaccctcaaggccttcacccgctgcgacgcgagttttttcagcagcctgaacacccaccgtgacgcctggcaggcctacgccccgctcaagcaagagaaggacttcagctggatcgcggtgcgcgatcgcaccgaccccaaggccaccgcagtgccggtgagcgcgccggccatcgccggcttgaagttgctgtcgtacaacgatgaggtcagcgatctcggcccgctgggcctgtattacttctggggtttcacggtggacggcaacattgatgaggtcgcgcagcgctttgccgcactgctggaccaacccgctgcgctgcaaaaaggcgaagggcaatacacgcgcagcgagctcaaggtgggcaacagctggcaggcgatcaagccgatgccgggcaaggcgccagggctgcgcaatgtggagcgggtgctgatcgtggagccggagggcacgcactcgcgtgtgagctgttcggtgcagggcggggtgactcccggcttggtcgcactgctgcggccggacattgcgccggtggattacccgcgcacggtggccgagacccatctcgccgacgtgccggtgccgcccactgtgctccagggcctcgacgcgccgctgttgcagcccaggttcaagacgttgagctacacctacctgtcgaagaatgacgcgggcaaggacgcgccgatcacgatccggttcaaggccgagggcggtttgctggtgaagaatgaggcctatggcaacgccttcaatgtggaccgtttaatgctggcagacctgatccagctgaaatcgaaaatgaacggcgtgggcgaaggccaggtgctgcagacccgcgaggccgaggtcaaactaccgaccagttgggcaccgggccagaccctgagtgcgcacctgaagatggccaatgtgccggtcaagcccactgacaaaccgaccgaaaccaccttgacctgcaaagtcggcgagcgcttcccggcgcgccaggtgtttgcgtcgttgacgggcgatgccatccggctggcctgcgagcaggacggctacacgtcgtcgcgcgcgtttatcgaggacctgggggtggccctgacgctggagtcgacgtcgagccagacccactatgtgaatgaaatccagacgctggacgttgtgcgctgattagggctccacgccacgcaagaacacatcgaagcggcgactgatcgcccgttgtgtttagccgcagtcgcactcaacgtgtgatgagccggcttgttgtggtgagcgggcttgccccgcgttgggtggcgcagccgccccaataaatacaccgcattctttcagacagaatgcggtgcctggtctggggccgcttcgcgccccaacgcggggcaagcccgctcgccacaacaagcccgctcaccacagataagtttgaacaaccacagcaagcccgctcaccacaagggattagggggcagttagaagtggcgtatgagcgaaccaaacaggtcgccccggggcatttggctcaacgggatttcggcgttctcgaaccactgcgcactggcttcaggatggggcccgctcagtatcactacgcctttctcgaaggtataccgcgccgctgcgacgtcgccgttgcggtaggtcgcgatggccgtgtagggcgctacctttgggaagtaagggccgtcctggaagaacacctggtcgggcttgccgtcccatgtgacctgcacggcggcgtcggcgctgtcgggcacttcgaaaccggcgcggccagcttcgccgtcgaggtccaccgggatcaagccgaggttgctgtcatccgccaggtaggcgcccatgcacaagcccaggtagcgcccgccgttggccacgtaatcgcggatcgcctcgctgcgcgcatcgcccaggctgcgcagggcgccggggatgtcctggccgccgccgggttgcacgtagaggtcgtagcgcgccagggtttgcggggtgatgtcgatgggctcgtcggcgcccacgaagtcgatgcggtagttggggttgatgcgctgcagggcctttgccacgttttccgaacagtcatcgcagccagccgggccacggtagatggcgacacgggtgataggcgccgaggcttcggccggtgacggcagcaaaagggcaaaggcaaacaacgtggcgacgacagctcgcaggttcatggtcaaggactcctgaaggaccacgcaaagcctatagcgattgcgccgttgaatccgttaacagttgtaaacgacgttgagttggggataactggtggtcgagccccgttccgagagtgcttatcatgtttgaactcaccgccctcatcacctatatcgccgtcgtgatcggcctgttcctgatccccggcccgtccgtgttgctggtgatcacccgcaccgtgcagggcggccgcaaggtcggggtcgccaccggcctgggggtggcgtgcggcgacctgctgcataccctgggggcggcgctgggcttgtcggcgatcctgatgacctcggccaccgcattcaacgcggtgaagtgggcgggcgcggcttacctgatctacctgggcatccgtgcgttcatggccaagaccggcacacagaaggggctgacgttgcctgcggtcacgccgcgccaggcgtttttccaggcggtcggtgccgagttgctcaacccgaaaaccgcgattttcttcctggccttcctgccgcaattcgtgcacccggaagccggctcatcactggtgcagttcgcggtgctgggtttgattttctcggtgctcagtgcggtgtacaccagcctgctcgcgctcgccatccgccccttgagccgaggcatcaaggggctgtccaaactgcggcgctgggaaggaaaaatcatcggcacgctgtttatggggctggggctgaaggtggcgttgcaacagcgttagtcacttggcaaacgcatactccccaccctgctccaccgccttgcgataggcaggtcgggcctggaatgtttctacccacgccgccaggtgcgggtaggcctgcaatttgccctgggccttggcgatttcgccgataaagctcatctggatatccgcaccgctcagctcgtcgcccagcaggtacgttttatcggccagcacgtcgttcaggtaacccaaatagttggccacttccgattcgatacgcggatgcaacggcgcgccggcatcgccgaggcggccgacgtagaggttgagcatcaacggcaacatggccgagccttcggcaaaatgcagccattgcacgtagctgtcataggcagcgctggccgggtccggttgcaggcggccctggccgtgatggcggatcaggtagtcgatgatcgcggcggattcgatcagcacctggccgccgtcttcgataaccggggatttgcccaacgggtggatggccttgagttccggcggcgccaggttggttttcgggtcgcgctggtagcgcttgatctcgtaaggcaggccgagttcttcgagcagccacaggatgcgttgcgaacgtgaattgttgaggtgatggacgatgatcatggcgtgctccgcagggcgagagggatgtcttgggaacagactacgccagcgtccgggagtgccgacaattaaatttcaacgcgacaaacacgcgtggttaccatggggatcgaatccacaggagttccgccatggacctgaagttcagtcacgtcgacatactggtcgaaaacctcgaggaggcctgcgcctattacgcaaacatcctcaaagcacgcatctccaagacctttgtgtgggaacgcggcggtttgcatgtgcgctatgccgtggtgctgatggggcaagagcggttcatgttggtgcagccgattgccgggaatctgcgcgagctgctggacacccacggcgaaggcatgatttaccgtcattgctacaccacgccggacatcgaggtcgcctatgacgagctgatcgccgccggtgtgcagcccgagaatgaaaacggcgtgcccctggcccgcgagaacctgcagtcgccttctggcgggcggattatctggctgcccaagcgcttcgggcacttttccatggagatcctggaagagaagacactcgaggcgtttattgtggaggcgtttggctgatcgacgcccacgccgcctgggccagtaactgcgcgtagtcattcgggctgttcttgacccgcccggacaaccacgctcgggcgtagttttctgccgcgccaatgatcagcgatagcaaaagctcggcgggaatgtggctgaacgcttcagcgcggcccgcctcgctcatccactcggtcaactgccgattgcgctgtttgttgcgggtgagcaattcatccttgaacggaccgttggccacggcgaaacggctctggaacacaaagcgcgcccagtcgggttgcgcgtccacccactccacatagctgcgcaccagtgcctccacgcctgcctgggcggtttgcgcctgcgtcaggtagtgctcacgcaggacggcctggtcctccagcgcggcaaaaaacagcgcggcaacgatgccttccttgctgccgaaatggtggtagatggcgcccacgctggtgtcgcaccgcgcacggatggtttcgatgttcgtggcttcaatacccacttcgttaaagcaggccagggcctcgcgcaggatgctgcgcttgaggtcgctgcgccggcccgggaaggtgcgctcgatcagatcaggtgcgtgcatgaagtcgctcgccaaatgtgcggagtctaaaggtacggcagccgcgagagaaggcatggcttgacactcttgagatttacagaatattgttccgtcacagaatattattctgcaaacctatccggaggaaatccatgagtcagtttctcagcatgttcaacagcgcaggtccagccgccttcagccagatggcctgccaggtggcgccctacttcagcaccatcaaccctgaaatcgccgaactacgcccaggccacgcggtggtcaacgtgccgtttcgcaaggaaatcaccaaccacctggcctcggtgcatgccattgcgttgtgcaacgcagcggaactggccggtggcacgatgaccgatgtgtcgatcccccaaggcgccaaatggattcccaagggcatgaccgtggagtacctggcaaaggccaagtcgaacatccgtgcggtggcggatggcagtggcattgactgggcaacggctggcgacaagatcgtgccggtggatattttcgatgagggcggggtgaaggtgtttacggcgaagatcaccatgaatgtgaagatcgcctgaggccacggcagcaggaggaggacctgacccgatgctgaaaacagcgcaggacaaaatgtgggagggggcttgcccccgaatgcggtgtgtcagtcgctgaatctgttgactggtacaccgcaatcgggggcaagccccctcccacataggatctggtttgtttggaagacagctcagcccaggcggaaccgcgcagtgttgtcactcagtgcctggctgcctttgctcagggtgtcggctgcgcggttcactgcccgcgcaccgtcgagcaagcgcccggcggcctggtcgacttgctggatgttgccactcacttcatccgccgtcgccgcttgttcctcgacggcggtggcgatctgcgccagggtgtcggtcacgtgctgcaccgccccggcgatctcgcccaaacgggtgcccagcccggtgacggactccgcgtccgtcaacgcttgttcacacgcggcgcccatcagggtcaccgcctggctgaccgtggcgcgcaggctgtcgacggtgccggcgatctgcgcggtggaggcttgggtgcgttgcgacaggctgcgtacttcatcggccaccaccgcaaaaccacggccctgctcgccggcgcgcgcggcttcgatggcggcgttgagggccagcaggttggtctgttcggcgatgccgcgaatggtgtcgaccaccgattgaatctgctggccctgctggctgacttgctccagcgcatcggcggtgtcggtcaggcgttggttgagctgctggatgctggccgtggtgcgctggctatcgcggctgctgtcttcagcaatacgccgggtctgctgggcgctgcccgaggcctgttcgcagcttttggcgacgcccagggaggtcgccgccagctgggtcgcggcggcggcaatctggctgatttggtgttgctggtcttcgacttcggtgagggtgctgcccgattgcgaattgagggtaagcaccgccgagccgagctgctgcgtctcgtggttgacccccagcagactggtgcgcagttgcaccaccgccacgttgagcgcggtgctgatggccgccagttcgtcgcgcccttccaccgccacctccacgcacaggttgccgtcgcgcagggactcggccagggtggtgatgccgctggcactgcggcggatcgaagcttgcaggcacatgaacaggtacaacgcggccagggccagcaggctgaatgtcgccgcgacggggacgaacttctgcaacgagcgatcgcggtagtgacccaggcgcgcatccagcgaatcgagggattggttgcgcagcgcacccaggctgtcaagcatgccgtcgacactggtttcgaaggcggcggtgtcgagcttgatggtgccgccgaacacgccgtcgtcgagtactttgagttggttgtccaggcgttgcaggctggtgtcgtactgggtggtccagggttccaggccggcgtacggcttggccttgagcgatgccgccgccttgaccaactggtcgcgcgcatcgccgatacggccgcgcaggtcacgcatctgcaaacggctttgcaaggtgaattgccccgaggcgatggacgactggccgacactggccatgcgtccgatgcgctcgatcaggtccggtgtgtgctgggtggacatctgcatcaacaggtaggtttccagccatgggtcgaggatcaggccggcgtccagggtgatctgttcgcgcagggtttgcatggcggtcagggccgaggtgaaacggtcgtaaccgtccggccaccagcccacggtgcgcagggactgggagtccatgcccttgaccgtggcctgcaacgcttcgaagcgagccagcacgtcggcgccggcatgctgggccttgagtgaatcccccagggtttgcaggctctgcaggatcagcgggaaattcgcatcgaccttgtccatcgccgccttcgccgccggcgtcggggcgtgcaggatgtcggcggctttccagcgcgcggccaggttgcgctgcgccgtcaactggccgtccagcccatccagggccagcagttggcgaacgccggattgctcgctggaaatcacggtcagcttgtcgcgatagtccgcgccgatcatccacaggctgcccgccaggggcagcatgaacaggaagaacagaatctggaacttgcgcgcaaagccgaaccgccccagcaggcggatacccggtgataaaaggctgtgcatgtgcaaacactccccaaaaacgacccaggcggtgcaccgctgggtgaagccttgaaatgactaacggcaaaatgccatgtcattgattagattggctcaagcaagatacgggccgttgacagaggggctggagacaggcgggctcgcgaggtgagggtgcaggtatcgtgctcgaaaatggggcaaaagcactcagcattgaagacccagctgtaactattggcgcagtctgtaataacagcggaattacttcccgctgatcagcacttttctccccgctcacactgaaatctcctaacaccactggagattcatcatggcacgtgcacttaacagctccgaacgcagaaccttccgtgcagctcgctatgccgcgttgcgctcgctcgaattcaccattcatcacttgaacggcggcaatgccgatgtcgctcgggtgtggatgggcgtccagcaacctggaaacctgcaagccttggctcaacgtctgtaccggatttttcaggcactgcagaacattcatgaaggacaggtcaactgcgaacccaacgcaaattggtatgcagaggtccaccccgacgacgcagggcatcacatcacgctggggggtgcattcttcaacgccccgacctacggcaatgactcgcgtgccggcacgttgatccatgaaaccagccatttcaacgatgtgcttggcaccgacgaccacgcctacggccaggaggcctgcctgcgactggtgcaacaagccgagcaaggcgatggcaacctgcacactgtcctggccaacgccgacaactgggaatacctggtggaaaacacctattgagttgcggcagcgacactcggaaaaagcctgttctcggacaggctttttcatccccccactatcaggagttgaacatggaacgtcgattattgattggcgcctcgctggcagcactgtacctgttggcaacaccggcacatgcgctcagcactgccgacgctgaacctgaaacactgaaagcgtatgccgtcacactgaacgctcacgcgagcaagttccagtggcagcaattatggaaagcctcacgtgaacacggttatttcaacaacggttctgctacgtatttcacgacaccgatgccgcacgtgcccgacctggtgtccgccgtcctgaataaggcaacgagcgttaccccctttgcctcaactcgggccacttaccgctatgactttgcggcaaaagtaggtttatccaacaacgtggccgtcacagcgctgtgcgttgatgtggactggcgcacgctacctgatggaaccgatgttgaaaatgcgcacgcgatgcaatcggtaaccctgttgctcgcccaaccctgcccatgatgcaagcagccacccgggatgtccccgggtggctgtatccagagtgttacaacgcactcgccaacaaagcagcttccttgcagcgtcgggtggaatagcgatcgccgaaattcctcaagttgctctcggctgctttccagtccgctgccacaacttgcgcccaaaacttcggcgtacggctcgcaaggttgccgtactggaaggcaaccgaggcgatcacggtttgcatcggcgccggcaatgcatcaaacgggcgtccggcagccttgctgtaatcactggccaggcgctcgatgaagggcgccttgtaggcctcgtcgatcctgcatgcatcctgcacactgacattcaacggcaggcgctcaaggcatgccacggcttgcgcaccgatcaaccccaagtagggtaaaagccgctcgctgagatcctggggcagcatgtccaggttcttttgctggcccaggtcaaagccggtgccgatggtgacgccgctacggctgttttccggatcaggcacgtaaccacgggtggcgctaccgccttcgagccgggcaatgaaggccatatctattgaattattggtcatggtgagtttcctcttggctttaggaaactgcagtccatcactcacgccatccgctcttcagaaggtaaaacttcctcatcttcataggtaaagtttcctactgattattcgcacgcattacttcctaagctctgaccagctctcatcacaaggaggttaggccgatggaatcgaaagacctggaacacatcgatgttcgacaactcccccattcccttcagatgctggttgcctgtatcggtctggaaaacgcattccgcttgacttgcgtatatggcggacgccccaagtacatccccaaacacgcacaacgtacttcgctggcgctgattttatcgccggaagccttacaggcgttgatcaatgatttcgcaggtatttctttagagattccaaagtccgatcatttttttcggcagattcgtaatcagcatattcaaatgggtatttccgatggcgtatcacgtagtgcactggccgagaaatacggactgagcctgcggcaaatcgcgaatattcgacgccaggatatttgtattcatcggtaattacttcctactgaatcagaaagtgccacatggatagattcaagttgcgcactttcgcgcactcacgataaggaaattaaacatggcagatattgataaaggtctcattggaggcgtgatcgccgcacttccactggacaagatgatcaccgggccgctgatggcaatgatccaggcacaagtcgccgccagtaaagcgtacgcggactttctcatgggcgtgtgcatccaggacggcaaggccgtttcggtgcagttcgactatgacgaaaccctcgtcgatgagcaggggatctacaagggcacggtcagcaagaccatgcgcattccactgctggccgcaatcagccaccccaacattaccattgaggaaggcagcatcgagttcgagttgaccatcacccaaatggccgaggacactagctccaatgatgtttccggcagcttcgacgccaagatgggctggggtcctttcagcgtttcagtcaaaggtgccgccagccacaagtcatcccaaacccgcaagactgacacccgcgcacgctacgaaatcaagaccaaaatcgttcgccaagacccgccggaagccttgatgcgcgtcatcgatttcctcaccgatgccgccaccaagccggtcaccctgccgagcgccaccccaaccagcccgacagagcttccaaaagcaggggtactgcctatgcctgacgccaaacctgcggaaaaaaccaaatagtcccaccccgccccgccccccagggcggggcaacccacttgacttgaaaggagctcaccatggcatttttttcgcgccccaaggaacccatgtcggccagcgacttgagccacataacacgcgggctgcaacaggccgctgcggccacgcacaacctgatcgtccatcaatatattgcgctgttcgaccagttcttcgattacaacgttgaagacctgggcacgccgatgaaggccaagatggttgaggtctcgctgaccgaggggcataccatcagcgtgccgctgatcgcactggtcgcaccgaagggcttggcactgcacaagatggatgtagacctgtcggtaaaaatgcacagcaccgaagtgcaaaaagccagccatgacctggagaacggcgacctgcacagcgagaagtttttcgtgacctttggcaccactaagcgtgagggtcaagagcgcgatcccgatgaggtgcagatccgtatcgagttcaaggcgtgcgagccaccggaggcgatcaaccgaatcatcgaggagtacaccaacttgatcagcccgatggcaaacgcgcccggcccttcctccgctaccggacaacccaccgcacaacccccttcggacttcgcaccctaaaggccatgcctttcaaggtctttgaaaaaccggcgatgtctggctgatagcctcccattaagagcgagcactgcaactgtggcaagcccgctcgccacaaaggacttatcgcctgttctacctaaagacttgaaagggctgaccctaaaggcgttttaaagggcctattgcgtcaccctgtaccggtcgaaattattgatgtgatcatccagattatcctcaagcatcatccggtactgatcgcagaagtacttcaacatggcctcccgtgcatcggccatttcagctccggacttgaagttgcgtgcactggcccaggcattgaagcgcgtggtgccaaacatcatcgaggcgctgacctggccgaggttttcgtgggtctggagctgctcgttcgacagctcgatatgcgcgtcggcgcggtcgtagaaagtggggtcgatggcgtctgccatggtggttttccttggtcatcaggtttgaatgagggtagatcaagccagcagcgcggttatccacctggcctgtcgggaaatctcctgccacttgtctggcggcactgcctgccgcgcctgctcgaagctggccagggtcttgtgcttttgctgcaacaggcgctgccacttggcaaggaacgccgggctacgcgcctgcatttgcagggggccgaagtacagctgttcggcggtgtacgccaccggcccggtgcgctcggcgacgatgatttcgtagtagaaacggttctcgcgcagcagctcttcatggaggatggagtaaccgttgtgcatcagccattggcgcagcgcttgttcgccaccgttaggttgcaggatcaggcgttcctggccgctcaggtgcagtttgccgttttcaagaatgtcgcggatcgtctcgccgcccatgccgcagacgctgatggcggtgatgccgtcatggggttcgatggccgccagaccatcggccaggcgcacggtgacctgctgctccaggccgttgtcgcgcacggtacgttgcgccgcatgaaagggcgtggtcgcgacctcccccgccagcgccgccgtgatcgcacctcggcgcatcaacgccaccggcaggtaagcgtgatcggaaccgatgtcggccagtcgcgcgccagccggtacgttggcggccacgcgctccaggcgctgggataaggtgtgttcgttcaacggccctgctccccggaaaaccgatcgcggctgttggtcaggtgcaacaccatggcggcgcgggcggcatccgggtcctggcgcttgaccgcgttgaagattgcctcgtgctccaggttcgccaactgccccagcttggcaaaatcggcgccgccacgttcatcgttcttcacctgggtacgcgggatcatcgcattgcccaggtgcagcatgatttcggtgaagaaggtgttgccggtggcctcggcgatcagttggtgaaaacgtttgtcttcctccacgcagctgtcgttattggccagggaagcctggtagtcgtccagggcctggcgcatgtgagccagttgggcgtcggtcctgcgaaccgccgccagagcaacggcttgtacttcaaggcccaggcgcaactccagcatgttgcgcacgctggccaccgtgtccacgtgcaagcgcaacccctgctgggcctgctgctccaacacaaaggtgccaataccgtggcgggtctcgaccaggccggacgcctgcaacttggagatagcctcgcgcaccaccgttcggctcacgccgtgttcgcgcacgatggtggattccgagggcagtttttcaccgggtttgagttggccgagcaggatgcgctgggtcaacgcgtcgaccacgccttgggccaggttggtggagcgtctgcggacagagcttccattatcgatgggcatattacgtgtccacagggttgagcagcggcaagcttaacattcccacctgcccgtcgcgtcttcaggatgtttgatgtcaaaaaaacaatccacttgtatgacaacacactaaaaacgcattttaaaaatcaaaaaaccccaatactgttgcgaaaaaaataaatcaacttgtatgatgtctatcaacaagacacacacacccgcataaaaacaatcagggggagttttgaatggtgaccacttcaagccacgcatctgccacacccgaaaatgatccagtcctcacgcgcgccgtgagcaaagtgaagggccatgtgctcccactgttcgtgatcatgttcatcctcaactacatcgaccgggtcaatatcggctttgtgcgcacgcacatggaacacgacctgggcatcggcgctgcggcctatggtttcggcgccgggctgttcttcatcggctacgccctcttcgaagtgccctccaatatgctgctgcaaaaggttggcgcacgtatctggctgacccgcatcatgttcacctggggcatcgtcgccacgctgatggcgttcatccagaacgaaacccacttctacatcctgcgcttcctgctgggtgtggctgaagccggctttttcccgggggtgatctattacttcacgcgctggttgcccggtgtggagcgtggtaaagccattgcgattttcctcagtggctcggcggtcgcgtcgctgatttccggtccgctttccggcgcgctgttgcagatcgaagggtttggcttgcatggctggcaatggatgtttgccattgaaggcctggcctcggtggcgctggggttctttgtgtggttctggttggactccaaaccccacgacgcccaatggatgacccgcgaggaacaggacgcactggtcaatgccatcgaccaggaacaacgcgaccgcgaagccctcaccagcgtcaagccgaccctcggcaagctgctcaaggaccgccagatcctgctgttctgcgcgttgtatttctgcatccagctgacgatctacgccgctaccttctggctgccgagcatcatcaagaagatgggcgatttgagtgatgtgcaggtcggcttcttcaactcgatcccgtggctgatctcgatcatcgccatgtacgccttcgcctcgctctcgggcaaattcaagttccagcaggcctgggtcgcggcagcgctgttgattgcagcggcggggatgttcatgtcgaccaccggcgggccgatcttcgcgtttgtggcgatctgttttgcggccatcggcttcaagtcggcgtcgtcactgttctggccgatcccccagggctacctggatgtgcgcatcgccgctgcggtgatcgcgctgatcaactccatcggcaacctgggcggctttgtggcgccgaccaccttcggtttcctggagcagaccaccggttcgatccagggcggcctctatggcctggccggcacctcggtgctcgccgcgatcctggtgttctttgccaagacgtccccctctgccgcattgaagccagcgagcggcgtgcccaccgccgctctcggcaaaccactttgagcccagtcaggaacctgccatgaatactcccgtcgttacgcacttccaggtcatccccgtcgccggccacgacagcatgttgctcaacctcagcggcgcccatgggccgtacttcacgcgcaatatcgtgatcctcaaggacagctcgggcaacaccggcgtcggcgaagtgcccggcggcgagcgcatccgcgaaaccctggaggacgcccgcagcctggtgatcggccagcctatcggtcagtaccagcgcatcctcaaccagatgcgcagcgcctttgcttcacgcgacgctgccggccgcggcctgcagacctttgacctgcgcattactatccatgccgtcaccgccatggaagcagcactgctcgatttgctgggccagtttctcgaagtgccggtggcggccttgctcggtgaaggacagcagcgcgatgcggtgaaaatgctcggctacctgttctatgtcggcgaccgcagcgcaacccccctcgcctaccgcaacgaagccgacagcgacgatgactggttccgcctgcgccatgaaacagccctgaccagcgacgccgtggtgcgcctagccgaagccgcccaggccaaatacggtttcaacgacttcaagctcaagggcggcgtattgagcggcgatgccgaaatcgaagccgtcaccgccctggccgaacgcttcccggacgcacgcatcaccctcgacccgaacggcgcctggtcactgcaagaggctatccgcctgtgccgcgaccagcaccacgtactcgcctatgccgaagacccctgcggtgccgaaaacggttactcgggccgcgaagtcatggccgaattccgccgggccacgggactgaaaaccgccaccaacatgatcgccaccgactggcgcgaaatgggccacgcgatccagttgcagtcggtggacattcccctcgccgacccgcacttctggacgatgcagggctcggtgcgcgtcgcacagatgtgccatgaatggggcctcacctggggctcgcactccaacaaccacttcgatatttccctggcgatgttcacccaggtcgccgccgcagcgccgggcgatattaccgccatcgacacccactggatctggcaggacggccagcgcctgaccaaagcgccactgaaaatcgaaggtggttacgtgaaggtcccaagcaaaccaggcctgggtgtggagatcgacatggacgcggtggcccaggcccacgaagtctacaaaggcatgggcctcggcgcgcgggatgacagcgtggccatgcaattcttgattccggggtggcgcttcaacaacaaacagccgtgcctggtgcgataaacgcccacccactgtagaagcgagcttgctcgcgaagatcgccaacgaaaaacgcgccccccccctgggtaaacgcgctgcctaggttttcttcgcgagcaagctcgctcctgcaattggctgcaccgtcagctcgacgcccaaggccagcatcagcttctggatcgtttcatagcgggtcttcgagccgcctttcaacgttttatacaggctctcccggttcaccccagcggcctcggccaccttgttcacaccttgggccttggcaatctcggcaagcgccttcatgagcacctgcaggtcttgagccttcatgctctgcgccagatacgcactgatggtttccgggctgtcgagaaagcgcgaagcctcatagacgctggttccggacgtatccagatcgaggatcggcatgtcctcgggtttgaatttcgattcgctcatttcatttacctctcagggcatcgagaatctcttttgcccgcttgatgcctcttttctggtcagtcttatcactgccccacagcatcaagtaagcggtgatccccgtacgcacgaaatacatcctgtaaccaggcccgacgaacacacgcatttcactcatgccgtcgcctaccgattcacaatccccaaaattgttttcctccgctcggtccaagcgggtcagcaccgccgttttcccccagatatcccgcataccgtcgagccatgtatcaaactccggcgtcctgccgattaaattagtcacagtatcacttgtagcctacaggctaccccttgtcgatgccaatggatttttgtttccggtgagcgccggaataaaaaaccctagttcagcacccgcacaaacatcggatggatactatgagtgcttgtttccccagtgtttaaagcacccgatcaaacaacggcgccacgtcataccgctgcttcaacatctgtgcatccaccaaaaaatccgccgtggcctgggcctcgctgacaattgtcggcgagatcggcagcaccttgatcgcatcgcgcttgaaccacaccttggcaatctccggtgccgactggttggccttggaccaggcttcggcgtattcatcgacgtgggtgttgctccagactcgggcgcgagtcaggcgggcaatgaagtctttgatgatcgcgcttttctgcgccagggccggctcgtacgccacgatgtaggtcggcgcactcatcaggcccttggcgttgcggatcagggtgctgccttctttttcctgcagtgacacgtagggttcccaggtgccgaaggcgtcgatgtcgccctgggtcagcgccaggctggcctcggccggcagcaggtatttgaagttgacgctgctgcgcggcacacccgcttcatccagcgccttgtacgccagttgctggctccatgagccgttccagatggcaacggtcttgcctttgaggtcggccaccgagtgaatgcccttgcgtgccacaatacccacgccgtcgaggctggtctgggtgctggcgacgactttcaccggtgcgccgttggcggccaggctgatcaccggggtgtcgccgacgatgcccacatccagcgcgccggtggccacggccgaggccaccggggagccggtgttgaagcgcttgaagtcgattttgtaaggcaagtccttcagctcgcccgacagctccagcacgatgcgattggagaagaactggtcacccacgacgagagtcaacggctcagcggcgctggccgacggaccatagagcgcaagagaggccacgcccagcaaggacagcagtgttcgacggttgatcatgaaaaatcccacagggttagagggttggtttaaccatctgtgggcatgcagtctggtcgcttgaggtagaagctaacgcaataaaagcgcggggtttaatactgttgggcactatcgatagaaccgtcccacaggtcgctagttgcttttcgtattaaaaccttcgccgcccctgggttagggtgacgtcaccagaccactggaccccagcacctgaaccactttcagcaaggtccattgcatgtcgattcccgctttgaatatctggggcgctccgcccactgcccgctacgaacaattggccgcgccgtttcgcccactgtttgcgcagattctcgcgcaggccgccgaggcggatcagacacgcgccagcctcgccacggtgatccagcaactgaatgccctgggtttgccacgctggcgcctgccggccagttatggcggccaggatgcgagcctggtcgagctgctcacgctgctcactgaactgtccgccgccgactccaacatcacccaggccctgcgcggccactttggtttttgcgaagacgtactcagcgccaaggacctcgactggcgcgccaagtggctggaccgcctcggccaaggcgccctgctctcccccggcagcaccgaagtcggcaacggagcccgtggcgacttcgacacccgcctgcaccgcgatgccgccggcgcattgcgcatcagcggcaagaagttctacaccaccggcgcgctctacagcgacctgatcaataccattgcaaccggtgaaaacggcaccgtgtatacggttgtcgtcgacctgaaagccccaggggtaaagatcgtcgacgactggaacggcttcggccaacgcctcaccgccagcggcacgtgcattttcgacaacgcaccggtggtggacgacgacgcgcgccccacccaacagcgctttggtcacgggcagtcgttcttccagctctaccacctcagcaccctcgccggtatcgcccgacgcgccgccctcagtggtgccgaagaactcagccagcgcgcccgcaccttcaccaccggcaatgccgacacggcgagccaggacgtgcagctgctacaggtgattggtgaagtcgcgagccaggcctacgccgcgcaagccatcgcccagcaagcggcccggcgcctggagtacaccgcgcagtatgtgattgcccacgaccagccactgcatgacgatgacccgcaggttgcattggccgagctggaagtgtgcctggcggtgaacccggtggtggatgcgacgctggccgcgaccacggccttgttcgatgccctgggcgccagcgccactgccagcagcaaggcgctggaccggctgtggcgcaatgcgcgcaccctggcgaaccacaacccgcgtgtgtacaagtcgcggatcgtaggcaattacctggtcaatggagtcctgccgcctgcgcagtggcgggtgggtgtggcaaaaagcactgacagttagagggcacaacaaagatcaaatgtgggagggggcttgcccccgattgcggacatccagtcactgcattgttagttgacccatcgccatcgggggcaagccccctcccacaggtaacctacacgctcacaaacttcagcacccgcgccaacatccggtcacaggcctgcaactgctccaggctgatgaactcatccggcttatgcccctgcgccatactccccggcccgcaaaccaccgtgggaataccggcctggtcgaacaacccgccttcggtaccaaaggccaccgtgccaaaatccggcgagccacagaactgcgccacccactctgcggcctggctttctggcgacgtggccagccccggataactggacaactcgctgaggctgatcgccgattgcgcactcactgcccgcatcgccggcaacaaggattgttcagcgtagtcgcgcagttgctgcaccacctgccagggatcctgggccggcagcgagcgcacttcaaagtcgaaactgcactcctgcggcacgatgttcaatgccttgccgccgctgatcaagccggtctgcaccgtagaaaacgccgggtcgaaacgcgcatccagatgctctggcgccttgagcgtttcgccgagccgcaccagctcgctgaccagccgcgccgcgtattcaatggcgttcacgcccgccggcgcgtacgccgaatggcacgccgcgccatgcacctggcagcgcatcgccagcttgcctttgtggccaagcaccggtttgagttcggtgggttcgccaatcacacacagcagcggcttgaccggctgcccgtggaaccgctcgatcagcgagcgcacgcccaggcagccgacttcctcatcgtaggacagcgcgatatgcaccggcatgcgcaacggcgcctgcaccaacgccggcacgcatgccagcacacaagcgatgtagcccttcatgtccgccgtgccacgcccgtacaacttgccgtcctgttccgtcagctcgaacggcgccacgctccaccgctgcccgtccaccggcaccacatcggtatgcccggacagcacgaagccgggcacctgcgccgggccgatggtcgcaagcaaattggccttgctcttgtgtgggttgtaaaccagttcacaggccacgccgtggtcttgcaggtaagtgcgcacgaagtcgatcaaggccaggttggattcgcggctggtggtgtcgaaacgtaccagttgcgccagcaggtcgcggctgttcatcggtcatctcccggcaccgcataacccggtgcgatctgcgggttgagggcgcggtcgatgtaatcctgcagttgcccgcgataggcttgccagagttggtcgagggcgcggatcgggtccatatcggcccaatccacgcgcagattgaccaccggccacagcaggtcatcgacgatcaccagcgccgccgaatgcaccggccccgcttcaccaccgcctgtcacaccggcgtgcatcgcggccagcagccggtcggccaggtgccccggggccgcttcgaacgccgccaccatggcctcgatcacccctgcgtgggccaacatgttgcctgccgccacgcagccctcaccgctcactgcgtggtgaatgcccagggtctgcgcaccgctgaaatgcgcggtgcggcccaggtgatcaatcacgctgacctggcgatactcgctgtgatcctgaccggccagggtcgccagtgcttcactcggcgccaggccctgctccaataagtccagcacctgtggccccaggcttggcaaggtgatgttctgcgacgccaccgcgcccacaccggggcgcagccaggggcaacgcgcacccacggcaatgctcgatgagctgatcgcaatgcccaactggcccgtctcggcgcagcgggcgacaacggaaaacgtcatggggtgtcctcagtcgagcacggaagggtccgcggcgatcatcaactgcttcatttcttcgaaatgctggcgcgaaaagtcggcgatgccttcccagccgcgcgcggttttttccgccacgtcatcggacagcactcgcaacggctgcccggtggaccaggccgtgacgaggatctggcaggaacgttccagggtccagatgtcgtcgaaggcttcaccgatggagccagccgtgaccatcacaccgtggttgcccatcaacaagcgcgtcttgccgtcgagcagcccggccaggcgcgcgccttcggcctcggtgtcggccatgccgccgtacagctcgtccacggccacgcggttgaagtagcgcgcagtgttctggtcgatcggcgggatgtgcggcctggccaggcacgccaccgccgtggtgtacaccgggtgcaggtgcagcaccgcacgggtctgcggcagcagccggtggatctgcccgtggatcgaccacgccgtggcatccacgttgggatgatcggcacaggcggtgtcgtctgcgttcagcagcagcagatcgctcgcgcggatacgtgaaaagtgcttccacttcgggttgagcaaaaactgtttgccatcggccgagacggcggcgctgaagtggttggccaccgcctcatgcatgcccaggtgggcgatgatgcgaaaggtcgccgccaggtcgatgcgcgtctgttcttcgtgggataacgccatggatcggactccgcagggcgcggccgcaggcgaatgcggcacgcgcgtgtaggtttacttcggcatcaatgcggcaatgtcggcatcggtcggcgcctggaagttgtacttcttgagcagggcggcgtactccggcgtggcgcggtatttgtccaggccgtcgagcagggcttttttcaccgtgtcattgcctttcttcacaccgaagccgttgagcaccgggtagatcaaggtgtcggacgagatcaccacgcggctgccgagcttgtcgatcacgccccgggccacggcggcgtcggtgatctgtgcttcaaccgcgtgggccagcagcgcctgggtggtttgcgggtcggtgctgtattcgctgatctggatcggcttcaggcccttggccacgcagtattcggtggacagcttgttcatctgcgccagccacgaggtggcgcccatggagccgatcttgtggccgcagaactcctccggggtcttgggctggaagctgctgtccttgagggtcaggatcgactcgccgctcttgaggtaagggatcatgtcgatgactttgacccgctcggcggtgatgtacatcgacgaattggtcacgtcgaaacgcccggcttgcaggccggtgatcaggttgggaaagcgcgtatcgagggtctcgaccttgcggcccatgaccttgcccaggccgtccatgaattcgatatcaaagcctgccggcttgttgttatccatgtactcatacgggaagaacgtcacatcggaaccggcgatgatcttgccgtcctgctggaacgccgaagcggccagcgaggtcagtgcaaccgctgcgcccagcaggcacacggcaaggggacgaacacttttacgaaacgctgtcatggtgattacctgcaagggtttggggggttaggcagtggctgaatcttgtcccgcctgttgaacgaagaacgacgcgccacggggtttctgcggcaagcgcatgtggttgtgggtggaacgcaccaggccactttcttcaccggccaccagcaggccggcatgtgcgctgggcaacgggttttcgccgaagggcagcgcgtcttcagcggcatagacactgatgaacagcgtgcgcggcagttcggtctcgttagggctggaagcatgcagcagccgggtgtgcatgaagcacaccgagccggccgggccgtaacaggccaccggctgctggcagtgttgcgcgaccacgctgtcgtccaccgagccggtgaaacgctggttctgccagtgcgaccacagcgggcctttgtggctgccggggatcacgttcagcgggccgttctgcggcgtcacttcgctgaccatcagcaaggcggtgacgatgtcgtcgttgctgtggggcgtaaacaggaagtcctggtgccacttcacctgggtcgcggtgtggggcagtttggagttgatcttgctgtggtgaaaacgcgtgccctgggcgccgatcagttgcgcggaaatcgccgccatgcgcgagtgcaacgccacgcgctcatacgccggcgaaatctccgtgggcgagctgacccggcgcagcgacgggtggtcggcgcggtggtcaccctccaggtcaaagcgctcacggccatcgacggtggcgccccagccccggtcatgactgcggctttcttccacccattggtcgaagtcatgctgcagcgcggccacttcatccagtgacagcacgccttctaccaccaggaagccgtcgcgctggaattgttcgacttgcgattgctcgatcattttagtgtttcctgaacgttaaacagatcacgccagcgagacgtccttgaggaacgcctccacgcgtgggttgtggccgctgcgcagggcgcccggcgtgtcgtcgcagaccacgcggcccttctccatgaacacgatgcggtcggagaccttgaaggcgaagttcatctcgtgggtgacgatgaccatggtgatgccctcctcggccagggcttcgatcacctgcagcacctcgttgaccttctccgggtccagcgccgaggtgggctcgtcgaacagcatgatctgcgggcgcatcatcagcgcgcgggcgatggccacgcgttgctgttggccgccggaaagctggtgcgggtacttccaggcgtggtcgagcatgccgaccttgtgcagcagcgcgtaggcctgttgcttgagctcggcggtcgcgcccaggcggtggtatttgggcgccatcagcaagttgtcgagcacgctcaagtgcgggaataggttgaagctctggaacaccatgccgatgtgcaggcgatgctcggcgtgttcgacgtactggggtttctgcgcgccgactttgttcaagtgaatgaagggctggccgttgatcctgatctcgccgttatccagttgttccaggccgttgagcaggcgaatcagtgtggtcttgccggagcccgacgggccgatcaccgacaccacttcaccgggctggatctgcagattcaccgagcccaacacctcgatatcgttgtaggccttgtgcaagcgcgtggcctgcaacgccgactcgccattattggccgggcgcgccaaggcggtgcgctgttgggtcgccagggccaacaccgccgcatcgggcatgcgggacacgttgcgctggttgacgtcgagaaagcgctccaggcgtttgagcaggaagtcgaacaccgtgacgataaacacgtagaagaacgccaccgccgccatggtttcgatcaccaggaagttctgcgaatacaggcgctggccgaccatcaggatctcggtcagggagatcaccgacaccaacgaggtgagcttgacgatagagatgtactcgttggccagcgacggcaaggccacccgcagcgcctggggaatcactacgcgccactgggtgccgaagaacttcaggccaagcgcccgcgccgcctcgccctggcccttgggaatcgacagcaggccaccgcgatggatctcggccacataggcggtttcgcagatcaccagcgccaacaggccggaccagaacgggtcggccagcaccgccgaggtgcccggcaacgcttgcggcaggttgtagataaagatcagcagcaccagcaacggcaggctgcggaacagccagatatagccgcgagccggcacgctgagcagaccatgtcgggattgcttggccagcgccagcagaaagcccaggccaatgctcaacacccaggtcagggtactgagtttgatgaccgtccacgtcgcgcgccagaactcggcatcgcccagcaaaccaaacatgtaattccagtcgaatgtcatcgtcgctgtgccctgagaagttgatctacatcgatgggttcagagtcgtggcgggaggcggttggggtcaattcgtaaaagccggggcactgggtaggcagaacctatgcagtctgaaagcaaccaaaatccaatgtgggagggagccccctcccaccattggtgcaggcttgaatcggccgtattgcgcacgccacttattggtgcaacctcagctcacaccgctcaacacccgcacggcatgcggatcaaaaaagcttggcggcgccatgccggggatgtactggtcggacacaaacatgcggcagcgctcggcaaacgccgacaccacccgcgacaactgggtgttgctggccgtggcgtagcccaggcgcatcggccggtgcgcacccgccaggcgcaggcggatgacgcgcttgccgtcctgggacatattcgatttgggccgcgcattcgcgaaggaatagccgatgccattgcccaccatggcgcgcaccgtttcaaggttggtggagcgcatgatgatgttcggcgtggtgccggcctggatgaacaggctgaggaaatagtcacgactccacggcgtgtcgagcagcaccaccgggtaggcctccaggtcctgcatgctcacggccggcgagttcgccagcgggtggtactcgcccaccatcacgtagggcggcagttgcgccaggggttggaagtcgatgtccgggctggtcaccaggtcgtaggtcagggcgatatccagctcgccgctgcgcagtttttccagcagctcttcatggttgccctcggcttgcgtcagccgtacgccgggaaacgcacggccgaaaccgaacaccagctctggcgtgatcatcggcgccagcgactccaggcagcccacgcgcagcggcccgcgcaccgtgttcaaggactccgaggcgatggtgtagaggttggtcatctgttccaggatcagcttggcttcctgcatcaccaggcgccccaccgccgtgagggaaatgccctgggcgtgatggcggataaacagctggatgcccagctccgcctccatatgggtgatcgccgccgagatcgacggcgacgacacgtgaatgcgctcagcggccgcactgatgctgcccgcctctcccgacgcgacgaaatactccagttgacgctgagtaatacgactgagcatgacgcctgcccctcaacaatgactgtgcaggtggtgttgcagggttcgtgccgggtcaggcgcaaaccgatgacctgcatgggcttcggtttttcctaagcactaccccgcgcaaatgctggtttcgccgcaaccggggcggtgtgaagctggatctatcccgcttcccacgagctgccgttatgccgacccacacccgtattcgcatgttcaatacccgacagacctaccccaaccaggcgctggacaacgacctgtgccaggccgtgcgcgccggcaacaccatttacgtgcgcggccagatcggcaccgatttcgacggcaacctggtcggcctcggcgacccgcgcgcccaggccgagcaggcgatgaagaacgtcaagcaactgctggaagaagcaggttcggatttgtcgcatatcgtgaagaccaccacctatctgatcgacccgcgctaccgcgagccggtgtaccaggaggtgggcaagtggctcaaaggtgtgttcccgatttccaccggcttggtcatctccgggctgggccagccggagtggttgatggagatcgatgtgatcgccgtggtgccggacgattgggccgtatgaacacgctgattgcctggagtgccccatgacccatcgtgtgtttttcctcaacgggcccaacgccaacctgtatgggctggataaaaacggcacctatggcagcgaaagcttcgccagcatcgacgcccgctgccaacgccacgccgccgcgctgggcctgaggctggactttcgccagagcaaccatgaaggcgtgctggtggactggattcaggaagcacgcctgcaggccgacgccatcgtgatcaatgccgccgggctcagctacagctcggtgccgatcctcgatgcgctgctggcgttcgacggcccgatcatcgaagcgcacatgagcaatatctggcagcgtgaaagcttccggcaccactcctacgtgtccagggccgccaccggtgtgatcgccgggttgggggcgctgggttaccaactggcaatcacggctgtggccgaattgctaggccaaaccgcctaatgactgttcaggaaccgcctatgtccgtcgaaaaaatcaacaccctggtcgtcggcgcaggccaggccggcgtcgccatgagcgagcacctgtccctgatgggcgtgccccaccttgtgctggaacgccaccgcatcgccgaacgctggcgctcggaacgctgggactcactggtcgccaacggtccggcctggcatgaccgctttcccggtctcaccttcgaaggcatttcgccggaagccttcccgccgaaagagcgcatggccgactacttcgaggcctacgcggataagttgcaggcccctgtccgcacgggcgtggaagtccagtcggtggaacgccatgcagggcgccccggcttcaaggtcaccacctccgcgggtgtgatcgaagccgtcaacgtggtggccgccaccggcccgttccagcgtccctcaatcccgaacatcgtccccgccagcgcagcgctgcaccaactgcattcctctgcctacaagaaccccggccaactgcccgaaggcgccgtgctggtagtcggcgccggtgcctccggctcgcagatcgccgaagaactgcaaaaggccggcaagaccgtgtacctctcggtgggcgaacactaccgcccgccccgcgcctatcgtggccgtgactattgctggtggctgggagcactgggcttgtgggatgaagtcaaaatccagccgaagaaaaaacacgtggcgtttgcggtgagtggctatgaaggcggcaagacggtggactttcgccgactggcccaccaggggattcagttggtgggtgtcacccaggactgggtggagggcgtcatgacgtttcaaccggggttggccgagaacgtggctgaaggcgaccgcgcttactttgacgtactgcgcgatgcggatgcgtatatcgaggccaatggcttgccgtttccgccggagccacaggcctgggaattgttgcccgatccagagtgtttggtgaatccgatgttgaacctggacctggctgaagcgggcgtgaccacgatcctttgggccactggcttcactttcgatttcagctggttgaaggtggacgcgttcgacgaaaaaggcgaaccgttccacaagcgcgggatctcggcgcaaagcgggatttacttcctgggtttgccgaacctggtcaaccgcgcatcgtcgtttatctatggggtttggcacgatgcgaagtacgtggcggaccatatcgtgttgcagaacgcgtacatggcgtacgacaagtcctaagacgctcagggcaggtcgaccgcaccttgccccgttgcctacagttgcgtcagaatccgccggcttgtgcgcttgggtgggtgtctctaacgtggctcggtcgctgaacactcagtgatcgggtttagtagcccgagtgacaacataaagtgcatgagcctcatcgatcagatgttcttgtctgtgcttgatggtggctgtgcgcagggcgccctcgggcgcgccggctttgtgtgtttccccggtctactaacctgcgtacagctgccaccctctcgtttagtagcgaaaaggtggtggccctaaaacaggtacaacacacatgttcaaagtcacacccaaccctccaaacagtctggacctgaaactgaatcaggcggcgcaccgtgcaattgatcactacctcaacaccggcgccgaaccgccagagccacctccaccgccatcgacaacgctgttcagcatcgccaacgacgccagcaacgagaccttgatcgtcaacagctacgaaaccttttcctcggtgagcgccttgctgctcgacctgtcggaggcgttgacggggaaacagcgggatgtggcgctggccattcaccagttgagtgagttgggggttttgttggtggataagctgatggagcgcgaagctgatcaaggtctttgagaaaccggccatctccggctgataccgccccataagggcgaacactgcaactgtggcgagcgggcttgccccgcgttgggnnnnnnnnnnnnnnnnnnnnnnnnnnnnnnnnnnnnnnnnnnnnnnnnnnnnnnnnnnnnnnnnnnnnnnnnnnncccaacgcggggcaagcccgctcgccacagggtacttatcgccagttttacctaaaggccttgcgtgctttcagccacgcttgggtagcttccaattcggccgaataaagtggcaggtatagccattgggaatccgctccagataatcctgatgctccggctccgcctcccaaaacggccccgccggctcaatctcggtcacaacacggcctggccacaatttcgatgcatccacgtccgccgccgtgtcctcggccacagcgcgctgctgctcgttcaggtaataaatcgccgagcgataactcggccccaggtcattgccctgccggttaggcgtgctcgggtcatggatctggaaaaagaactccagaatctgccggtagctgatcaccgccgggtcgaacacgatttcaatcgcttcggcatggttgccatggttgcggtaggtggcattcggcacgtcgccgccggtgtagccgacgcgggtgtgcagcacgccggggtagcggcgcaacaggtcctgcatgccccagaagcaaccgccggcgaggatggcggtttcggttggtttggtcatggtctgcccttgcgttcagtggatacccgcctagttatggggccgtgttggccaatagcaagattcacggtttgttacgcagtgcgccagcacctcagggtttgaagtttttcatcagtttgaacaggtggccgggccagatccagcgtgactggggcgggtcgcgagtctcatcgagagcgtccagaaaggttttgttgggcacatcaccgtcaggtccattcacgtttggacgcgggagagttggatcgtttggcgggtcctccggcttatagacccgatgggtggctgcatccagcacgtaaccggcggccttgccgtactcagtgaggctccagacaccgtcgatgacttgggagactgcctttgagggtggaagcttgatgtccttgtgcgtggtggtgacgatatggtctgcagttttggcgtgtttgaaggtggcgtactcgctgccgagtggaggttgatccgcgccctcgtcggagaattttttcaccatacgttccaggaacggtatgccgccgatgtgggtgaacgcgcccatgcccgggttcaggatgtgtttcacaaagccagggtcaacacgggtgctgctgagcgctgaactggtgagtatgcgtgaggcgatggcctcgtcctctggcttgtaattgaacgtcgtccaatacccgtctacgtaaaagccattggtggctatgtattggcgaccgtcgctggagcgtcgatactcgccgagtgcccagaccaaaagatcaacgtggcctaaatccgcaccttctgactgtagatatgcatacatatccgcgaccaaggcacgatcatcgaggttgaggaagtcgcttgctctttgaagggcattcactgaagtggccggtggaaggccgacggggggttctctaccgccaaacacgcgcgaaatcatgatctcacggccgacactggcagcctgccccgaactagaaccgcctgaaggctccatcgacttggccgtttgccacgccacccttcgctcattgaccgtgaaggcgccgccgttgtcgcgggcgatcaggttgagttgatctcgcccgagtcccttgaaggggttgctgtcatgaccgttgaggaaaccggtcgcttgtcgcgcacgggccaggagttccgggttattggccgttggaagctctgcgtcgtgttgtgccttgttggcgaaatactgttcgtcggtgatgggttcgagggggttggcgttcttttggcccgtgggcgcctccgcacgctgtgccgcatcactcaattgacgcgccaggattgagacggtcgtggtgccgttattacttgaagcaatgggcgcatcacgttcaccgccatcaagcgagatagcggacggagtagcaccgctgacggaatcgcttgtcacgcgactgttggacgatggcgtataaggactgatagtgaccatttgtcttcacctagcctctattaatccgcctgactcacggacatggaatgcagtgcgccggcacctcagggtttgaagtttttcatcagtttgaacaggtggccgggccagacccagcgcgactggggcgggttgcgggtgtcggcgagggcatccagaaaggtgttgttggaagcatcaccgtcaggcccgttcacgtttgaaaccgggtgagttgaaacgctgcgtggttcctctggcttatagacacgccggttagccgcatccagtacatagccggtggccttgccgtattcggtgaggttccataccccgttgacgacttcgaagagggcctcggaggggggaagttttatgtccttgtgcgtggtggtgacgatatggtccgccgccttggcgtagttgaaggtggcgtactcactgccgagggggggttgatccgcaccttcactggagaattttttcaccatacgctccaggaacggtatgccgccaaagtgggagtacaccccgatgcccggatccaggatgtgcttcacaaaaccctggtcaacacggctgttgccgagcgctgaactggacagtatccgtgaagcgatggcggcgtcctccggcttgaaatcgaacgtcgtccaatactcatcgacgtaatagccattattgctaatgagttggcgaccgtcgctgaaataacgatagtcagcgagtgcataaaccaatcggtcgacgtgacgtagatccgcaccttctgaatgtgcataagcgtacatatccgagatcaaggcacggtcatcgagggtgagaaagtcgttgcgattttgagtgccgttttcaaaggtcgcgggtggaagggcaacgggtggttcgtcattgtgaaacatgcgcgaaatgaagatctcacgaccgttaatggggaccagcgtgggattagaagcgcctgaaggcgccatcgactggacagtttcccacgccacccttcgctcgttaaccgtgaaggcgccgccgttgtcgcgggcgatcaggttgagttgatctcgccctagtcccttgaaggggttgctgtcatgaccgctgaggaaaccggtcgcttgtcgcgcacgggccaggagttctgggtcattggccgttggagtctctgcgtcgtgttgtgccttgttggcgaaatactgttcgtcggtgatgggttctagggagtcggcgttcttttggccaacgggtgtctccgcccgctgtgccgcatcactcagttgacgcgccaggattgagacggtggtggtgccggcattacgtgtagagaggggggcatcagcctgggcgttgtcaggcgagactgttgacggaataacaatgccgccggattcattcgtcacgcgactgttagacgaggaggtattagggctgatagtgatcattagtattcaccttgcgtagggcatgtgaatggtcatgtaaaagtttcttgcctatccaaatacccgcagccaaattcgctgcgggcatcacaccacacactaatagctatatttaattgtcacagcatcaacgccggcaggacgagcgtaaggtggagcgccacccaataccgtatgaaaaatcgtaacttttgaaccatgaccgaagggctggctattaaaatccatcagcacacccgaagaactcggaaagatatcacgacaatctttttcggcactgaaggagcgaaagtaacacagctcaaccttctcactgagtgtcccaggatagtatgttgtactccaccgaacttctgatatctgcttgggatactggagtgttcctgatggaatatccgcagccagcacactaaagtttgcgaattcacgacttggcacagtattagaattagacaaaaccaatacgggagttggcgccaccgttttagtaaaaacgccctccgccgccaacaccacatcctttgtaaaaaccgccaacacaacacacacaacaagccaaactttactaatgcttttcgagctcttcataatcttcaccctagttcataagtgagcacctgaggttccaatcattccagcagtaggaatcacaccactacccttgcacgatttttcaattcaagtaaggcacccgcttcctaaaaacatgaagcccttatctgtaatacttacaagtaggactttgtcagtaacttcctagtcccgtctcccctctattaaaaacccctgctccaaggcatgatgccgccctcacatcaaggacgataaaaccgtgaaaaccaccctcaccgcgctgctgttgattggcttggcgatgcctgcattcgccgataccaagcccatcggcttcaagaacatcaacgtccctgatgcacaacgcccgctgcaaatggtcgtctggtaccccgccgccaccgcagctacgcctgagttgatccgcgatgacgccgtgtttttcggtgccttggcagtgcccgatgcgccggcagcgagcggcgaacatccgttggtggtgctttcccacggctacggcggcaactggggcaaccaggtgtggctggccagcgccctggcccatcaggggtatatcgtggcggcggtcaaccatcccggcaccaccagcaaggatcgcagcccccaggccgctgcgcagttgtggcaacggcccaaagacctgagccgggccatcgatgcggtgatcgcccagccgacgcagttcggcaccgtggcaaacaaccggatcgccgtggtcggccactccatcggtggctggaccgccatggaaatcgccggcgcgcgtttcgacccggacctcttcgcccgcgattgcaatactcatcccaaattgggcggctgcatcggctaccagcagatcaagcccgccgcgaccccggcggcgaaggcccaactggccgcactgccggtgccggcgctggtgattgcggggggcgtgccaacggaagatatggaccccaacctggagtccgccgacatggtcaggcgcatgcccaaagcctcgacccagtacgtggaaatcctcgatgccacgcacttcagcttcatgtcgatctgcaagccgggtggcatggcgttgatcgaagaagactcgccgggcgatggcatgatttgccgcgatggcgagggggctcggccaagggcggtgattcagcaacaggtgctggatctgatcaccggttttttggggcggacagcggcacggcgcacggcggccgatttttagctggtatcatcccgggcctgtacaacccgggtagaaccacatgaaccgccagaaaaaactccagcagctcttcaaggaaaaagccaggaaggccaacgccaagttggcgccgaagaagaaggacaagtacatcagcaaggcagaccgggaaaagctcgcggccgaagccgctctggacccaagcctttccccggaaagctgactcagcaaccgctcaacgcgacctgccgccgctcgcccgcaaagaaaaatggccgcagccgcacgcccacgctgttgccgataaacgccgccaccagccacacccagccatgcaggctgcccgaggcgatgccactgaagtacgcgccgatgttgcagccgtacgccaggcgcgagccgtagccgagcagcaggccaccgatcaccgccgccaccagcgagcgcgccggaatcttcaggctgggggcgaaacgcccggccaggccggcggccagcagcgcaccgaggacgatgccgatgtccatcacgctggtgatgtcttcccacaccggcgcggccagggctttggcgttgcccggcatctgccagaacgcccaactggccacgtccacccccaggccgctggcgactttagcgccccacagcgcgaatgcagaggtgatgccccagggccgtcccgccaacgccagggtggcgtagttgagcagggccaggccgatggcgccccacaccaatggccatggcccacgcaggaagcggcgcacgccttggtgttcgcttttcacgccctcttccaactgaccatgacggcccttctccagccgtacggtcaccagcgcgatgatcgcgaacaccaccaggctcaagcccaatgccggcaccacgccgaagctcttgacgatggacaccgccgggaacgccggcagcgcaaaccaccagtcaacatggtgcgtggcgatcaacgaaccacagataaagaacagcaaggtgaccagcatgcgcgcattaccgccgcccacggtgaacagcgtgcccgatgcacaaccgccgcccagctgcatgccaatgccgaagataaatgccccgaacaccaccgacactccggccggcgccaccagcccggtcaccggctgcccgaacagcgtgcccgcccccaacgccgggaagaacagcagcaccgccagcgccagcatcaccatctgcgcgcgcaagccggcgccacgccgatcattgatgaacacgcgccaggccgaggtgaagccgaaggcggcgtggtagagggtcaagcccagtgcggcgccgaccaccagcaacagcacctggcgcgagccaacgctgttttgcaagaacagggcgcccagcaccaggatgataaaggccaccagcggcgcgacgggcttgcgcgcgggggtaagaggcagtgaggtactcatggggaatctcggtctgtttgaatggagtaggctgcgagggtggcgagtataaccttgtgtgtagataatcctgggaggcgtgtggcctgacggcgcccctttcctccatcagccggtgaccccgtggccaaagacatcgagaacccttgcgtttccctctgccagctcagcggcgacctgtgtgtcagttgcggacgcaccaaggatgacatccgcaagtggaaacgcatgaaacgcccggagaagatggccgccgtacagcgtgcgacacagcgcctcaaggctttgaagaaagccaggtgaggccgttcatgcatctgtggtgagagcgcgtctgtggtgagcgggcttgccccgcgttggagtgcgcagcgctcctttttttttggggccgctacgcagcccaacgcggggcaagcccgctcgccacaaaataagcccgctcaccacagaggcccgctcaccacaattggcccgcaagatcgcggatcaaccccgccccaccgaccccgacaccggaagatcccccagcaacttgagcccggtgctcttcacaaacgtcgcgtagtccatcggtttctggatacgcgtctcggcattgggtagcacataggcccaggcacgtttgctggaggcgtcgtacaccagcttgaacaaccgcgtcggcacccataccttgttatcgccgatggtgccgtagcccgggtcgaacagcgggcctgtgaacacatacacatcgccgccggcgcgcacggcaaacttacgcacgtcggcctcgaccttgctccagatcttgcggttgttggtggggtcctggggcaccatgttcgacagcgcgaacgactgcgccatggcattggcattcggtgcatcggcggccggggattgatgcccacggtccaccgccgggtgctgggcgcggtagtcgctcaactcggcgcgaccggctttggggatacgcggatcggcatagaactggttggtgcgttcctcgcccttggcgtctttcagcaaggcggcattcaggcgttcgaccaccaccagcggggtcttgctggtttgcgagtagagcaccgcaaaatggtcggaacacagtgccaggggtttcatcgcggccggcaccgtggcggggttgatcggtgcggcggggaacaggtcggcacagctgtcgaaggacagttgtttttcctgtttggagtagaggtccggcaggctgcgggcgttggccccacaagacagcaaaacaaaggcggtcagcccaacggcaattttgcgtaggtacatgcattaaatcttcgaaaaggagtgaagcggctggctccggcgtgcggagccaagtggatgatattgcgaggattattgactagcagatgtgagattagtgcccgaccgctgtaggttttcccgcagcccgcgcgcctggtttgaaaccatgggcatgggcgccccaggcaatcgccagcgacacgccgatcaacagcagcatcgcccacggaaacgaagccacgccccaggtctccagcagcaccccaccgaccacgccgctgccggcaatcgcgctgttccaggccaccacattcagtgacagcgccacgtcggcgccatcgcccgccgcatcggccagggcggtttgcagcagggtcgcggcgccaccgaaactcaggccccacaccgctacaccgatatagaccacttccggccggttgccgaaaaggcccagccccagcgcgacgatcgcgaacaccgccaggctgacgagtacggtcttgcgcaataacggctcaacgagcctggccgtgagccagatccccgccaacgcggccaccccgaacaccaacaacaccaggtcaacccgctctgccaaccccgcaggcgccacgaacggtgcgatgtaggtgtacagaatgttgtgcgccagcatccaactgatcaccaccgccagcaccggccgtacgcccggcgtggtcagcacctggcccagtgacacacgttgatgggcgggctggggcgcatagtccgggactttcaccagcacccacgcaatcaacaccagactcactgccgacatcaggccaaacgtggtgcgccatcccaccaacccacccagccaggtgccgagcggtacacccaatgacagcgcaatcggcgtacccaccatcgccaacgccaacgccctgccctgctgatgcggcgcgaccatgcgccgggcgtaaccagccagcaagctccaggccagaccggccgctacgccggcgaagaaacgcgctaccagggtcacgccatagtgggacgacagcgcggtgatggagttgaacagcagaaagccgacgatggtcagcaacaacacattgcgccggcgccagccacgggtcgcgatggtcatggggatcactgccagcaccgagcccaaggcatacgcggtgaccatctgcccggccatcgacggggatatcgccaggccgtcgctgatcagcggcaacaggccggcgggcagggtttcggtaacgatgcagatgaagccggtcatggccagggcgagcaaggcgccgatgggcaggcggtcggatgacgccgataaagtgagtgagggtgtcacggagaactccttgagcgagacttaaatactgatcgatacaaatgttgcggccgagcacggctcgttgtcaacgacttatgtatcgactagtatttatctcgcttccccaccggagatccgccatggcacagatgggccgcccccgcactttcgaccgcgaccacgccgtagaccaggccctgcacttgttctggcagcatggctacgacgccacctccctggcccatctcaaggctggcctgggcggcggtatctccgcgccgagtttttatgccgcgttcggttccaaagaagccttgttcgacgaatgcgtgcagcgttacctggcgacctacgcccaggtcaccgaatgcctgtgggatgaaagcctgtcaccgcgtcaggcggttgaaacggcgctgcgccgatcggcacgcatgcagtgtgaagacgggcaccccaagggctgcatggtggcactgggtgtgatgagtgcaccgagcccggagaatgcgcgggtggcgaatgggttgacgcaatcacggctgcgcacccgcgcgggaattgtggcctgtgtggagcgcgcaatacgtgccgggcaattgccaggcacgattgacccggcggtgatggcgacggtattcgacagtttcctgcaaggcgtttcgatccttgcgcgcgacaacgtgccccacgccagcattgacgcggcgatcagccaactgctgctgacctgggacattgccgcgtctacgacaccgcccattcgtcccgacactgcatcaggaaatccacaaacgcccgcacccgatgcggcatatagcgcccatggggatacagcagggtaaacggtcgtgaacgcccgccaaacggctgcaggacttccaccaggctgccgtcagccagttcctgctcgacgataaacctgtaggtctggaacaaccccgccccatgcctggccagggtcaccccgcccagcacatcatcggagcagctgtaccccgcctcccccgcatactcctgcgccttgccgtccacctggaacagccaggcgatgcgccggccattgctgggcagttcgtactggatgcattcatgggtgggcaggtcttccagcgtctgtgggatgccggcgcgtttcagataggacggtgccgcgaccaccaccaattcggcgtcttccagcaggcgcgcaatcagcgatgagtctggctgggcgcgcacacggaccgccaggtcgtagccttcggcgacgaagtcgatgttgcgattgctgatgtggatatccaccgtcacctgcgggtacaacgcacgaaacctgggcagcagcggcagcagacgatgatgggcgtaggtggtgggaatgctgatgcgcaacaggcccgatggcacggcttgcgcgcccatcacttcctgctgggcttccaccagctgggtcagggcctggcggcattgctcgaagaaagtccggccgctgtcggtgaggcggatgctgcgcgtggtgcgcacaaacagccgcgcgcccaagcgctcttccaggcgggaaatgctgcggctcacggccgccggcgtgacaccggcaacctgcgcggcggcggtgaagctgttggcctcggcggcgaggcagaatagttcgatactgcccagctgcacatcttcgaaatggcgcttcatggtcgctccctaaaacaacagccgcgagaaattgcagcacgcctgtgccagttgcgctacctcttgattcagcccgtattggcggtccacccggtgcaacgccacatactggatatccggcagcgccggctgggtcaccagcgcacgcagggtgccttgctcgatcaggtgggacaggcaggccacgggcaggtagctcacgccgatccccgacaacgccaacccggcctgcaccaacaggttgtggctggtgagggtgcgcggcatctgcacatggttggccgccagccagcgctcgtagatcatcccggtccccgactgtgaaccttgggtgagcacggtgtagctggccagagtctccaggctgatggggtcggcatccgggatcaggtcaggggcgcacatccaggcgttttccacgcattgcagcggcgtactgtgaaaacgcgggtcgctgtagacgtcaggcacgatgaccaaatccaactggtcgctttccagtttgcggaacagctcgctgctgagctccaccgacggttcgatctgcaccttggggtacatctgacgcagcgcttcgaccaacgccggcagccaagtgagtgcggtgagttcggtgacgcccaggcgaaaccggcgcaccagcacatcacgggcactgacccgttccagcaattggtcgcggctgttgagcaggtcacgcgcgtagtccagcagctcgccccccttctccgtcagccgggcgttacgtttgctgcggtcgaaaatctccacgccgaaggtgtcttccaactcctggatacgcttggagatggccgactgcgacatgttcaacttgttggccgctgcttcgaagctgcccagttcggcgatccagtacagcgcatcgatttgcttgaacgtgatcatggcaggctaatcatgagaaaaagcgatgctaacacatcataaaatatcgctaaaactctccgatcatcgctcataagatctggccatagcccgtcgctatccaacgattctggagatttgccatgtccttgcccggttcacgcatccttcccaacgcccccatggcctcggccgaactggtcgaggcgttcgcccaagtggtcaccccgcacatcagcgacaacctgggccggcacatcggcgcacgcggcctgacgcgctacaaccgcagcggcaaactggtgggcacggcgatcacggtgaagacccgtcccggcgacaacctgctgatctacaaggccctgagcctgctgcaacccggccatgtgttggtggtggacggccagggcgataccaacaatgcggtgatcggcgagttggtcaagctctacgcccagcaacgcggctgcgtggggtttgtgatcgacggcgcgatccgtgatgtcgccagcttcgacgacacgccttgctacgcccgcgctgtggtgcacaccgggccctacaagaccggccccggtgaagtgaacgtgcccgtgtccatcggcggtatgctggtcaaccccggtgacctagtggtgggtgatgaagacggcctggtcgcgttctcccaggccgacgccgccgaagtgctgcgccgcgccgcgcaacatgccgaccatgaagaggccgtcaaagcagagatcgccagcggtgccgtgcgccagagctggatcgacaaggtactggacaacgcagggctggcgtcatgaggcactggttgtctgatcgcgtcctgggcatcgcgccctcccccagcatcgccgccaacgcactggtcaccgagttgcgcgcccagggccgcgatatcgtcaacttcaccgtcggcgagccggacttcgacaccccggcgcatatccttgcagcggccagccaggcgatgcacagcggcgacacccactacacgcccaccaccggcaccctcgccctgcgccaggccatctgcctcaagctgcaacgggacaacgacctggcctacggcctggatgaagtggtggccggttgcggcggcaagcacatcatctatcacgcactggccgccacgctgaaccggggtgatgaagtcatcgtgcacacaccctattgggtgtcgtacccggacatcgcacggctcaacgatgcaacaccggtgatcatccccggtgatgaaagcctgggtttcaagctgtcgcccgacgccttggaccaggcgattaccccgcagaccaaatgggtgatcctcaacagcccgaacaaccccagcggcgcggtctacagtgaggccgagctgctggcgctggcccacgtgctgcggcgttatccacacgtgctggtcatggccgacgaaatctatgagcacttcgtctacggtgaagcccggcacgtgccgctgacgcgcctggcgcccgacctcaagtcgcgcacgctgatcgtcaacggggcctcaaaaggctacgccatgaccggctggcgcctggggtttggcgcaggtcccgcctggctgattgcagcgatcgccaagctgctgtcgcaaaccaccacctgccccagctcgttgagccaggcggctgctgtcgccgcgtttgccggagaccaggcacccatcgccgccatgcgcgaggaataccagcaacgccgcacacgcatgttggctttgctcgcggacatccccggtttgagctgtaccccaccagacggcgcgttctacgtgttcgccaatgtgagcgggctgatgggcaaagtcacaccgcaaggcggtcgcctcgacagcgacagccaactggtggactacctgctgcgtgactacggcctggccacagtcagcggtgcggcgtacggcatgtcgccctatgtacgcctgtccttcgcaagctcgctagaagtgatcgaagaaggttgccgacgtctcaaggacgcgtgccacgacctgcgctgacccgccctgctgcacccggcggccaacggacggccgctgttttgactgcctagaacaacaacttaaaaatcattgatcgcaaatgaggcattcccatgcacacgccccgtatcgcgctggtctggcaaatcatgatcggcttgctggccggcatcgccattggtgccctgttgcaccgctttcccgaatcccggccgtggctggtggacaatctcctgcaaccggcgggcgatatttttatcaagctgatgaaaatgatcgtggtgcccatcgtgtttgcctgcatggtggtgggcattgccgggcacggcgacggtaaatccctgggccgtatcggggtacgttccctaggctatttcttttgcatcactaccctggcaatcatcgtcgggctggtgctgggcaatctgctcaagccgggcgccggtacggagttgtcgagcctgcacgcggcaaacatcaccctgcccaccagcaacggcggtgggcatagcctggggcagatcgtcgtcggcatcatcccggataatgtgatcagcgccatggcccagggcagcttgttgtcggtgctgtttttcgcggtgatgttcggcctgggcgtcgcgcgcttgcccgccgagcgcaaggacccggtggtcgcactgctgcgcggcgtgtctgacgcgatgttcaaggtcacgtcgatgatcatggcctactcgcccatcggcgtgttcggcatgatcgccgtgaccgtggccaacttcggttttggttcgctgttgccgttggcgaagctgatcatggtcagttacgtgtccatcgcgttctttgtactggtggtgctcaacctggtggcgcggctgtgcgggatcaatctgtttgccttgatgcggcatatcaaggatgagctgatattggcgttctccaccgcgagttcggcgtcggtcatgccgcaattgatgaagaagctggagacctacggggtgccgccgtcgctggtgagctttgtggtgccggtgggctactcgttcaacctcgacggcgcctcgctgttccttggcatcggcacgctcttcgtggcgcagttgtatggcatcgatttgaacctgggggatcaggcgctgctggtggtgaccatggtgctcacgtccaagggcgccgcaggcgtgccggggttcatgttcgtgattctctcggcaacgctcgccagtgccgggttgccattggaggggattgcgtttattgccggggtgtatcgcttgatggaaatgccgaccaccgcactgaacgtgctgggcaacgcgctggcgccgttggtgattgcgaagtgggagggccgggaggtgccaggggctcaccaaagagcacctacgcggtaagtttcctgatgatgtgtaggacttgcctgattccgccggctcggctggaacctgccgctttttttcgctagattcctccccaacgcatatgggcaaccatgtgcccaccttccgaggcccgttgcgagaaatcgcacgggctttcgtgtttctcatggatggggaaatcgaatttggtgcagtacattgcttatctggatgagtttgggcacgtgggccaatatgtctcgcgaaaacacccgatgtacaagaccagccctgtattcgggttaggcggcatgctgattcccgccgaagaggtgcgcgagttcgcaatctatttctacaagctcaaatgccagttactcgcctgggacctgaaacacaaaaaccctcatcacttgcctgcctatcaatgggaaaagaaaggctctgcactttttactgtgggtaatgtgcgcaaatatccggagctgcgaagatcctcatgtcgtttgctgagtcatatccagaaaactggcggacacgttttctacacgggtgagcacaaatctatcgagcccagggaacacgactcgaccgagaccttcaagcggacgctgttacagtcaatccgcaagattgatcgcttctgtacgttgaacaatgcctcgttcatcgttctgctggatgagcagaaagcaggcaatgaatggcgcgaacgaaacgtagaagcctgtaccctggcgatgtttgaagatccagcagaaaaatgccgcacactgatagagcctccgcttcaaggtgagagctatctgtttcaaacgttgcaatgtgctgactggctgtgcggattgattggtcggctgacgacgtttgctgtcgctcctgaggagttcgaagactggcaacttttcgatatgtattttgcggcacgcatggctgacgtgaccctgccgagcagtggtctggacggtaaaaaaacggccaaagccaaagagcaattcgctcaattaacagcaaatgactgttaatcattgggccaaataaaggcgctcctgagagcgcctttattcagttcaactcactgctcgccgatggatttcacatccgccttggcagcgccaccaatcgcaatgcgttttggcttggcttcctccggtaccaccctgagcaggtcgatgctcagcaggccattggcaagctgcgcgccctgcacttcgatgtggtcgaccaggcggaacgacaagcggaacgcgcgctgggcgatgccctggtgcaggtaggtgatgccctcatcgtgttcgcgcttgccgccggcgacggtcaacacgcctttttccacctggatttccaggtcatcctccaccaggcctgcggccgcaatcacgatccgataatgatcgtcaccgtgcttttcgacgttgtgcggtgggtaggtggtgccggcctcgctgcgaagcgccgattcgaaaaggtcgttgaaacggtcaaagccgacggagtgacggaacagtggggccaacgaaagagtagtagccattgcaaaatctcctgaggtttctccaagtgatttgatacgcgacccgcattcggcatcgcgtaaaacctaagtaggttcgggctgaaaattttcaagcggccccacaaaatttttttatccgatgtgacgagctccggacgaaaggctgacacaccggcgcgccaggaccgtcgtggggtcaaccagggcgacccggtgggcaccgatctcgaacacctcacaatgcgccagcaccaacggtaactcggtacacccgagaatcaacaccttcgccccctgctcacacaaatgctccgccgccagcagcaactgctcgcggcacacgccctcggtaaaccccgccttgatcccccgttcgccgtagatcgcctccatcaccagcgcctggtaatcaaagcccggcgtgatgagttgcaagccgcagcgccgcgcggcctggtggtagacctggctttgcagggtgccggacgtcgccagcaagcccacggcctggccgctgccgtgggtgtgcacgatccactccaccgtctcgctgagcatgttgacgatgggcacgcgcaggtgcgcctggatgcgttcgacaaacgcatgggcggtgttgcacggaatcgcgatggcctgggcgccggcgctttccaggcgtttgcaggtggcgtacagggccagggtcgggtcggtttcatcacgcagcaggttggcggtgcggtcgggaatctgcgggttttgctccaccaccatcttgatatggtcctggtccttgtcggccggggtatgggcgaccaccttgcccatgaaatccacggtggccgccgggccgacgccgccgacgatgcccagtttgaacggcggctgacgcgccgggccatcggcctgggtggcgaactcggcgtagatctggttgatgtcgagggcgctgatgccgcgccgttgcaggtcgccgcagaccagcgacaactcggtcatgcccggcacaatcaccgtggcgccctgcccttgcagcgacaggcacgcctggtacaccgactccagcggcacgccatcgaggtggccatccttgatgccgttgacgccgtacatcgcctccatcaaggcggcctgggcgtggttctccgggtagaccaggatgaagtgctggccgaggtgccgttcaaacaagccgccgtggcgcacgaagtccgatgcgatcacgcccaggatggtgccgggcgcgacgtggcgggtgatgtgccggaccagcgcctgcatcatgtccagcaccggaatgcccagttcctgctggatttcagcgcgaaaggtctggctggcgaaacacggtagcagcaccgcatccaccccggtgttttcaaaggtcttgcacacctggaacacatagaacttgcgcgcggtcatgctcgcgttacggtccaggggcagcaacacatccttgaacggatgctgctcaaacaggaagtgatagcggccctggtcctccagcacggcacgggacttgaccagcttgtagaacagatcgccgcccgccagcgaaccgagcccgccgacgatgcccagccgggaggtggggttcatgcgtgcgcaccctgcggcagttcagcggggtcttccgcgctttcggatttggctaccaccgccgtggcgatgctgttgcccaccacgttggtggcggtgcgcgccatgtcgaggaactggtcgataccgatgattagcaacagacccgcctcgggcagattgaacatcggcaaggtcgccgccaccaccacgaccgacgcccgtgccacccctgccatgcccttgctggtgatcatcagcgtcagcaaaatcagcagttgctgggtgaaactgaggtcgatgttgtaggcctgggcgatgaacatgatggcgaacgcctggtacatcatcgagccgtcgaggttgaaggaatagcccagcggcagcacaaaactggagatccgcttgggcgcgccgaacttctccagcgcctccatggttttggggtaggccgactcgctgctggccgtggaaaacgccagcaggatcggctcgcggatcagcttgccgagggtgaacaccgagcggccgagaaacagatagccggcggcgaacaacaacacccagagcaaggcgatccccaggtagaactcggcaatcagcttggcataatcggccagcaggcccaggccattggtggtgatcgccgaagcaatcgcggcgaatactccgagcggcgcgaaggccatcacgtagtcggtgatcttgaacatcaccttggccaactcgtccacggtgtcggtgatgcgcgtgtaaccggcacgcctgaccccggcgagggcgaagccgaagaacagcgaaaacaccacgatctgcaggatctcgttgttggccattgcctcggcaatgctgcgcgggaatacatggctgatgaaggtcttgaggctgaagtcgccggtgttgaccggcaccgctgccgtcgcatgttgcaccacctgcatgttcagcccggcgcccggttggaacaggttgaccaaggccatgccaagcatcagcgagaccagcgacgccgtgacgaaccacagcatcgcacgcaagccgatgcgccctaccgagcgcgaactgcccatgctcgcgatgccgcccaccagggtggcgaacaccagcggcgcaatgatcatcttgatcatgcgcaggaaaatatcggtgaccagcgaaaagtatccggccagctccttggcggcctgctcgctccctgcatagtggtgacacgcccaacccaccagcacgcccaaggcgatgccgactgcaattcgacgggggagtttgttcttcttcacaggtgcggccctcagatggcttttgttgtatggagcggattctagggacgcaccccggcggccatgatgagtaatccggctaaccccatgcgcttttggaatagtttgcaaaaagcccagccccggctacgcgcggcgacatacactcagggctcatcgcctggagaaccggcatgcagatcaaatggttggacgacctcttggccatcgccgagtggaagaacttctcccgcgccgccgaagtgcgttgcgtgacgcaatcggcgttgtcgcggcgtattcgctcactggaggaatgggtgggcgtcgaactggtcgaccgtggcacctacccggtgcaactgaccgccgcaggcgccgccttctgcagcgaaagccgcgacgccctcgccggcctgatgcgcctgcgcgccagcctgcgcgaagtggaacgcatgccggggcgctcgatccaggtgaccgccgcgcacagcctgtcgatgaccttcctgcccaagtggctgacgcagttccagcgccagaccgagcagttcaatgcacgggtggtggcggcgaatattcatgacgcagtgattgcgctggaagaaggcagttgcgacctgatgatcgtctaccaccatcccctggcgccgatcctgctggacgcgcaacgcttcggcagcctggccttggggcatgatgcgtttatcccgttgtgcgcaccagacaaacgcggccgaccgctgtatcgcctgccggggagcacggggaagcctgtgccgcatctggcttacaccgccaccacgttcctgggccgcgtcgcagaaatcgtgatcaagaacggccctgcgcccgccgtgctggagcgctgctacgaagccgacatggccatgcttttgatgcgcatggccattgaagggtatggggtggcgtggttgccgcagagcgcggtggtggatgagttggagcgtgggctgctggtgcgtgcgggtggcgaggaatggagtacgcggttggagattcgctcgtactgcgcgattgaaaaccagaacccgacgatgaggaagttgtggcgcacgctcgaagggttgcgctgacgttaatgcacctgcggcatcgcccttcgcaaacgctgggccagtaaatcggagaacgcttgcgccagggccgtacgggggacatcactgcgaaaaaccaggccgaatgagtacggcaaaaccggtagaaaaggccgcgtcacgatcggcaagtccaagaaatcattggccagcaattcattgatgatcgacacgccgatgccctcggcgacgaacgcgcaggcggcacctgccgaatgcacttccatacgcacgttgggaagaatggacgcctgccgaaacacctggtcaagctccgtgcgcaggttgcgctggcggcccagcagcaccaacggcacaccgcgcaaatcactcacctggataacgcgccttgcgcacagcgcgtgcgcttggggaagcacgcacacgccttgcacctgcaacaccggcaccacgtcgaagcccggcaattcggtgggcagacgcacaaaggcaaaatcgacgctgcggtccagcaccgcacgctcaagcgcatcgtaggagccagtgaccagttcgatcacaaggtcatcgcggccctgcatgaattcggccaccacacggggcaaccattggtgggtcatgctggtgggcaccgccacgcgcagcagcgcccggcctgcgtgacccaggcgcagatcgtcggccatgcgctggacgcgttgcatgttgtcgaccagccccgacacctccggcaaaaacgcctcggcctcggaggtcggcgtcagcctgcccttcctgcgcaggaacaaggcaaagcccagtgactcctcgagctggctgagcaaacggctgatggccgactgggacaagcccatgcgcgtggcggcatcgatggtcgaaccggtcgacatgatggcctggaaagcttgcagttgtttgagattcacgctcgggctccaagcagacacgactgggcgcagtttccgctggcgacacctgcggcgtccagccttacagccctaccagagcttgatgtcgtaggtcaggtacaggcggttgtagtcccaactggtgagcacattggagcggtacgccgtgttgcgaaattctgcccccaagcctttgaacgtgccgtcctggatcacgtacttgaggctggtatccagctcgtgctcatcggccggtttgccggaatacttggcgtcgaaacctttgtagtagcggaccatgaaactcaagcccgggatcgccagggcggaaaagtcatagtcgtagcgcagcatccaggttttctcatcctccaggatgaatttgctcacccccggactggtaaaggacgtggtggccgcaccattcaaatacggcaatgcggcgtcaccggacaactgctgatagccaccgccgaacgtgtgcccgccgagtcgataactcaaggagccgctgaacatgtcggcgtccgcagcaccgttataggccgcccccgtttcaagactgttgtaataacgtacgtccgtcgtcaagtgacccggcccgacagctactttatgcacaaccccgaaaaagtgctggcgatagaagttttcaagttcaccgtagtaataagacagactgatggttttattcagtgcatacgtaccacccgcaaaataaaaatcaccgtgcttcgggcctttgtaaccgctcggtatcagatcgacgttatcgctggagttacgcaactttgattgatccagtcgcccaccttgcacaaatagatgttcgataccggtgtattcaaactgcgtgccttggaacgtctgtggcagcaaacgcccatcgttgtaactgaccaccgggttcttgggcaacaacgtgcccgtcttcaccacgacatcggcgaaacgcagcttgccggtcacgccgaggctggaaaaatcacgcgcggcgcggccatcatcctgcactggcaacaggcctgtaccggcgtgtgcagggctggagtcaagcctcagccccagcaggcccagggtgtcgaggccaaacccgacggtcccgggggtgaatccggaacgcatcgtcagcaacaacccctgtgcccattcgacacggtcgttgccgccgctgcggttgtcatgattgaaagcgtaattacgcaacgcaaggtggccggtggaatcctcgaggaaaccttcggcgcgcacgcttgatataccaggcaccattaagctggcgcacaaaagcccgccggtcgttataaacgcacgcatattaaagccctcagctgtgtttttttttgtggcagagagtaagaaaagttgcttgaccaagtatttcctggccgatgctcctgagtgttaatgaccgaaacgagtaaacaacgctatcgaattaaaacaggggcgacaagcttatgacaaacgcgcatcaggctatgacaaataacccgacgacaccttgaaacgcatagcccaatacgcgttcgtcataacattgtgaggtatttatgattgccctactgtgccgttgtagccgttggctatccccataaaaaaaagatgagagcaccgctatgtcatccactgcgccaacagtcaccgacaccgcgccacccaaaaacacccgccaactcaacccggcaatcatcttgctgagcattgtgttcctggccatggtgctgacttatgtggtgcgctccggccagtttgaacgccaagacgtccgtgtgattcccgggacctatcaggtactggaaaaagacacctcgctcagccaactcttcgccctgccgccgcgctcggcgaataaaaccgtggcacaaccggtatcgctggccgagacctttctggccattcccctggccatcgagaaacgcgccgggctgattttcatggtgctgttcatcggtggcatgtttgccgtgctgaacaagaccggcaccatcgatgccggcctggaccggctgctcggcgccaccaaaggcaatgtctacatcctggtgccaaccctgatgctcgcattgtcggcaggcagcaccttcatggggctggcgaaggaatacatcatgttcgtgccggtgatggtggccatggcaaaccgcctgggcctgcccaacatcgttggcttggcgatcgtcgcgctggcggtcaagacggggtacatgggctcgatttccaaccccatcgcgctgtctgtcgcacaacccctggtcgggctgccggtgttcagcgggctgagcatgcgcatcgtcgcgtacttcatttttgtcacgctggccgtcggctacatcctgttctacatccgccggagcggcttcgatacctcggccacgttttcccattcgggcaaaaaactctccgcgcggcataccctgagcctgatcacactgggggtgggcgtcggcttcctggtgtacgcctccaacacctggcactggaagtaccccgagctgtcctcgtattacctggcgctgaccatcgtcttcgccgccatcgcaggcatgagcccgagcaccacggcaagcacctttgtcgaaggcatgaacaagatgctcatggccggcgtgctgattgcactggccacggccgtggagtcgatcctcgccagcggccaggtgctggacaccatcgtgcacgggctgtcgcagatcatcggccagcacggccaactgcctgcggcgttcggtatgttcttcgcgcagatgagcctggatgtggtgattccgtccaccagcgggcaggctgcggtgacgatgccgatcttcggtccactgggccaactggccggcgtgagcccgcagaccacggtgtatgccttcttgctgggcaacggcttgaccaacatgatcacgcccacttccagcggcctgctggtactgcttgctgctgccaatgtgggctgggtgcagtgggcgcggtttgtgctgccgctgttcctgatctgcacggcggtggcgttgctcctgctcgcctgcgccgccctcaccggctattgaattcgactgaccaaggctttgtcatgaccctccctgcattcgaaaacatgcacatcgtacgcaaccagatgatcaccctgcgcgatggcgtgcgcctggccactgacatttatctaccgctgggcaccggcccctggccggttgtcatcgagcgcacgccctacgacaaatccggcccctcgcgctcggaaaaacgcctggacgggctgcaccttacccgcgagcagatggccgcagcctttaccgagcagggctttgtggcgatcttccaggattgtcgcgggcgttaccgttctgaaggtgtgttcaccaaatacatcaatgaaggcgaagacggctacgacaccttgcgctggatcgtcgaacagccctggtgcaacggccatatcggcagcatgggcttgtcctatgcagcgcacacgcagatggcgatggcctgctgcaatgcgccgggtctcaagaccatggtgctggactcgggggggttcgccaacgcctaccagtgcggcattcgccagggcggcgccttcgaactcaagcaagcgacctgggcctacaagcaagcccaacaaagcgccgccgtgcaggccgacccgcagttgcgagaggcgttggcccaggaagacattctcgattggtttgcacgcatgccgtggcgcccagggcattcgccattgcgccatgtaccggagtatgaaaactacctgttcgagcagtggtcccacggggacttcgatcagtactggaagcaactgggtatctacgccgaaggtttctacgagcagatcccggacatcccggtgttgttcatgtccagttggtacgacgcctatgtcagttgcacgctggacaacttcacggcgttcaccgcacgcaagcagtcacctcaacgcctgatcatgggcccgtggctgcacggtgaccgcaacatcagctacagcggcaacgccgaatttggcaacgccgcgcctttcgacggcaacctgggcgaagactggttgagttgccgagtggaatggatgcaacgctggctcaaaccaaccgaagccgaacggcgcgccactcatcaggtcgatgtgttcctgatgggcggcggcagcggccgaaaaaatgcgcagggtcggctggagcatggcgggcgctggctcaagtcgccgtgttggccactcgcgggcagccaacagctgaacctttacctgacagcacaaagagccctttcgccgcttgctcctgtgggggtgcccagttcattgagttacttcagcgatcccgcccacccggtaccgaccattggcggctcgttgacatcgggcgctccggtgtttgtgggcggcgctttcaaccaggtcgaaagcccggactttttcggcactcggggtgaccactcggcactgtgcgaccgagatgacgtagtgagcttcgaaacccaaccgcttgagcacgactgggtggttgccggcccggtgaaagtcgaactgtgggtgcacagcagcgcgctggataccgatttcaccgccaagttggtggacgtctatccgccgagcgacgattacccacaggggtacgccatgaacatcaccgacgggattttccggtgtcgctaccgggactcgtgggaacacccggctccgctcacgccgggagagccgttcaaggtggtgatcgaacccttcgccacctgcaacctgttcaagcgtggccaccgcctgcgcctggatatcgccagcagcaactttccgcgcttcgatgtaaaccccaacagtggcgaggccgaaggcatgggcgagcatccgcaggtggcgcgcaataccgtgcatatcggcgccgggcatccgagccgtttgatactcacggtcgtggacaacgcgctctcggaggcggaccaaaactgatgcgcgaggcgatttactgccgaaatcgcattgacatatcggtaaatctcgatatcctcgcgccatggacctactcgacatattcaaagccctctcgaaccgtactcgactcgacatcctgaaaggtttgaaggaccccgaaaagaacttccccccgcaggatgaaggggacgttcataccgtgggcgtctgcgtgagcagtatccaggaaggcgtcgggctgtcgcagtcgaccgtgtcggactacctggcaacgctgcatcgagcgggcttgatcgaaacccgccgcatcgggcagtggacctattacaagcgaaacgaagcaaccatcagcgcccttgccgagatcatcggcaaggagctgtaattttttgccccagaatatcgagaattcccgatatccctttttaccgaaacctacggctattgaaacctaccgctattgaaacccacgactactgaaacgaggtaatgcaatgaaagcgatgatgcttaaatcatttggcggcccggattcgttcgaacgctgcgaggtgcccaagccggtaccgcacacgggacaggtgctggtgcgggttcacgcaacctccatcaacccgctggattaccaggtgcgacgtggtgactatgccgagctggtgcccctccccgccatcaccggtcatgacgtgtccggcgtcgtcgaggccgtaggcccgggcgtgacgaacttcgcgccaggcgacgaagtctggtacaccccgcagatattcgacggccccggtagttatgccgaataccacgtggcggccgaaagcatcatcggtaagaaaccacctacgctcagtcacctcgaggcggcaagcctgagcctggtgggcggtaccgcatgggaagcgctgaccgtgcgtgcagcacttcgggtgggggaaaacatcctgatacatggcggcgcgggcggcgtcgggcatgtggcaatccaactggccaaagccatcggcgccaaggtgttcaccaccgtgcgtgaagccaatatcgagttcgcacagcgcatgggcgccgatgcgatcatcgactacgaaaaggaagattacgttgacgcgatcctgcgggaaacgggcgggcgcggcgtcgatgtggtgttcgataccatcggcggccacacgctttcacgcagccccgacgcactcgcgcaactgggccgcgtggtctcgatcgtggacatagcgcaaccgcagaacctggtacaggcctggggcaagaacgcgagctatcactttgtgttcacacggcagaatcgcggcaagctggatgagttgagtacgttggttgcgcagggccaactgcggccgcatgtaggggcggtttatgcgctggccgacatcggacttgcccatgctcggttggagggtgctcacaacggaattcaaggaaaaatcgcgattgccgtcgtgcccgctcaggaaacaagaccatgatttacgagatcgccgtgctgccggttcacaaggaacacatcgacgcgttcaggcgtgcctttgccgaggtggcgccgttgctgagtcgtgccaaaggccacttgggtcatatgcttgcgcagggggttgaaacaccggagcgattcaacctgattgtgcgttggaaatcgctggaagaccatacgccggggtttgaagcgagtgaagaccatcgggtgttcatgttgggactggaaaaatacttttcggaggaaccgcaggtttatcacattgagggggcggtttttagcgcctagagaaatccaaggcaaaaaaaagcctgcatcgctgcaggcttctctttatgtcgctatctggctccacgacctggactcgaaccagggacccaatgattaacagtcatttgctctaccaactgagctatcgcggaatgcgccgtatgttactgattgaaaaggagaagtcaagctttctctggcattcggcgtgattaaaccggatggccggttgaaaccctgtgctccctggccagttccagccaggccagggcggcgggtggcaggtgggcgctggcgcgccaggccagggcgatgtgccagtcggtgtggggttcgtccagggggatcagggcgatgccggggtgttggtgtttgtgcgccagcatgcgcggtacgaaggctacgcccaggccggcggcgaccaggtcgatgatgaagtcgatctgcccgctgcgagcggtcaccttcgggttgacgcctttgcgctcgcaggcagcgaggatcttggcgttgagggcaaagccggcttcgaacaggatgaacggcgaatcggccaggtcggtaaagtcgatacgttcaaggtcggccagcggatggctgatgggcagcacggccatcaacggttcgttgcgcaccggctggtagtcgaagtcttcgtccaccggcagcagcagcgctgccaggtcgacctcccccgcttccaggcactcgcgcagttttttgctgccgtattcggtgagttcgatgtcgatgtccgggtagcggctgcggtaggtggcgaacatggtcgcgaacagcacgccgcaacccaccggcggcaggccgatacgcagtacgccgcgcttgaggccacacaggtcgttgatctcggccaccaggtcattgcgctcggcgagcagcaccagggcgcgacggtaggcgatttcgccggcggcggtgagctcattgcggtggccgaggcgattgagcagcggcgtacccagttcgtcttccagggtcttgaccgccttgctcacgctggattgggtcagggacaccacctcggcagcctgggaaaaaccaccctggcgcaccacttcgacaaaggcacgcaatgttctcaggttcatcagtattcctttggcgactggctgccagcgataaaagttgtttttatcatgccagagaattgcctatcctgacgccaccttgcccgtggagcctctaataatgatcatctcgtccgcctccgactaccgcgcagccgccaagcgcaagctgccgcgtttcctgttcgactacatcgacggcggcgcctacgccgaacacacgatgcgcgcgaacagttcggacctggccgagatcagcctgcgccagcgcatcctgcgcaatgtcgacaacctgagcctgaagaccagcgtgttcggccaggaactggacatgccagtcatcctcagcccggtcggcctgaccggcatgtacgcgcggcgcggtgaagtgcaggcggccaaggcggcggcgaacaagggcatcccgttctgcctgtcgacggtgtcggtgtgcccgatcgaagaagtggcgtcgcaaagcgcgcaggcgatctggttccagttgtatgtgctcaaggaccgcggcttcatgcgcaacgcgctggagcgcgcgcaagcagccggtgtgacgacgctggtgtttaccgtggacatgcccacgcctggcgcacggtatcgcgatgcccactcgggcatgtccggcccgttcgccgcacagcgacgcatgctgcaagccgtcaccaagccgcaatgggccttcgatgtggggttgatgggccgtccccatgacctgggcaatatctccaggtacctgggcaaacccacccacctggaagactacatcggctggctggcgaacaatttcgatgcatccatcagttggaaagacctggagtggatccgcgaattctggaaaggcccgatgatcatcaaaggcatcctcgacccccaggacgccaaggacgcggtgagtttcggcgctgatggcatcgtggtctccaaccacggcggtcgccaactggatggcgtgctgtccactgccaaggccctgccgccaattgccgatgcggtgggcgatgagctcaccgtattggtcgactccggcatccgctccgggctggacgtggtgcgcatgctcgccctgggcgccaaggcctgcctgctcggccgcgccaccgcctacgcgctggccgccgatggccagcacggcgtggaaaacctgctggacatcttcgccaaggaaatgcgcgtagccatgaccctcaccggcgtcacgtccatcgcgcagatcgaccgctcgaccctggtctaaccctgctgttcgacaatcccgcgcgccttgagttgggccagttgctccggtgacaagcccaagcgctggccgaggatgtcgtcggtatgctgccccagcctcggcgccggccggtgatactccacgggggtgccggacagtttgatcgggctgccgaccatggcgaaatccgggttctgcggatgggggatcttcaccatcaggttgcgcgcgatcacctggggttcttccagggattgcgcgatggagttgatcgcccccaccggcaccttcgaggcatggatacatgccacccactcatcggcactgcgccccagaaagtgcgccgagagcagcgcgacaatctcttcgcgatgggccactcggtcagcgttacgacggaagcgcgggtcgtccggcagatgcgccaggccgatgctctggcacagcgcgacaaactggctgtcgttgccgcaggcgatgatgaagtcacggtcggcggcacggaacacctggtaaggcacgatattggcgtgggcattgccatagcgctgcggcaccttgcccgaggccaggtagttcatgctttggttggccaaggtcgcgacctgcacatccagcaacgccatatcaatgtattggcccacgccggtgcgctcacggctgagcaatgcggcctggatcgccacggtggaatacaggccggtcatcaggtcggagaacgccacgccgactttttgcgggccgccgccgggcaggtcatcgcgctcgccggtgatgctcatcaggccgccgatgccctggatgatgaagtcgtaacccggctcctcggcactcgggccggtctggccgaaaccggtgatggagcaatacaccaggcgcgggttgagctcggccagggtcgcgtagtccaggccgtagcgggccagggagccggctttatagttctcgatcaacacatcggaactcgccgccaatgcgcgtaccaactcctggccttcgggagtggcgatgtcgatggccacggacagtttgccgcggttggtcgactgataatacgaagcctcgccagacgactcgccggtgtcggttttcatccacggcgggccccagccacgggtgtcgtcgccgcttttcgggcgttcgatcttgatcacttccgcgccgaggtcagccaacacttgcccacaccaggggccggccaacacacggctcagatccagcacccgcaaacctgtcaatgcacccattgttcttatcctgtgaggttgggaaatcagccgaggctcggctcttcatggcgcagggaaacccccagcagtgcccgccgccgcagccacgggctggggcgatagcgcgggtcgttggtgagttcgctcatgcgctgcaaaatcgtgagcaggcgccgtggcccgagggcatcgccccaggccagcgggccgtgggggtagcccaggccgagctgcacggcctggtcgatatcctcgacgctggcgatgcgctgctgggcaatgtcgcaggcgaggttgaccaccatcgccaaggtgcgctgggccacaaagccgacgctgtcgccgatcaccgtgacgcccacgccatccgctgcgagcaaggcgtgagcggcatcgcgcatcgccggggccgtcagcgggttttgcatcagcgtgcggtggcgtgacaggtccgtcagcacatcgatgcacagcgtgcgcgccgggtcggtatcgaagcgcacgcaggcgctgctggcatcgcggccgtaaggcgccaataggcacaacgcctgcggcgacggttgcgcagcgtgttccagatgggcgcccaggtcgatcaccagggcactcaagcgctcgtagtcttggctgttttccgtggcgatccacaccgggggcagcgcttgcaccgtgggcaccgcctgggggtgcggggcgttgatgagttggccgttttcatactgatagaagccgtggccggtcttgcgtcccaggcgaccgcctaccagcatctgccgggtcaggggcgacggtttgtagcgtggctcctgatagaactggttgtagatcgactccatcaccgggtgcgacacgtccagcccggtgaggtccagcagctccagcggccccatgcgaaaccccgcgccgtcgcgcaggatgcggtcgatatcgccgcgctcggcgatgccttcctccagcatcttcagggcttcggtgccgtaggcccggcccgcgtggttgacgataaaaccgggagtgtccttggcgcgcacgccgcgatggccggtgcgcgccaccagcgccagcaaggcttcaccgaccttgggcgcggtggccaggccatcgatcacctccaccacgcgcatcaacggcaccgggttgaagaagtgcaggccggccacgcgctcggggtgccggcaaccggtggcgatggccgtgacggagagtgacgaggtgttggtcgccaggatgcaacgcgggctgacaatgccttcaagctgttgcaacaggccgcgcttggcgtcgaggttttccacgatggcttccaccaccaggtcgcaatcgcgcaggtcgtcgatgcgctcgaccacctgcaagttggccaacgccgcgtccatcgtcgcctgactgatcttgcccttgcccaccagtttggcaaacgtggtaccgagggtgtcacgggccgtttgcgctgcgccgtcgcgagaatcgaacaggcgcaccaccacaccggcctgggcggcgatttgcgcaatgcccgcccccatcacaccggtgcccaccaggcccagcgtattgataatgtcggtcatgcttattccccccggtattgcggcgtgcgcttttcgaagaacgccgcagcgccctccttctggtccttggagtcgaacaacaattggaacgccttgcgctccagcaccagggcgctttccagcggcaggtcggcaccggccagcatcacctccttgatctgctccaccgccaacggcggcagcgcggcgatctgcgcggccagttccagggcgcggggcagtgtctggtcgtcgctgaccatctcgctgagcatgcccatggccaaggcttccttcgcgctgaccatgcagccggtgagcgcaatgcgcatcgcctggaatttacccaccgcacgcaccagccgctgggtaccgcccgcgcccggcatcaaacccaacttgacctccggctgggcaaaccgcgccgactcgcccgccacaatcaggtcgcaatgcatcgccaactcacagccgccgcccaaggcaaaaccgttgacggccgcaatcaccggcttggggcagcggctgatggcttcccacaagtattcggtgtggcggcggtacatatcgatcgcgccggcagcggcgaactccttgatatccgcacctgcgacgaagaactgttcgcccccggtcagcacaatggcgcgcacatcctggcggcgagccagtgcacggaaatgctcggcgagcgcttcacgtacctgggcattcagggcgttcttgacgtcgggacgatggatacgcaccacggccacgccattgtcctggacgtcgagggtcaccacgggtgggttagcgttggtcacattcactcctgctgcactgttcttgttagttggattacgctagtttcgctgtgcgaaataacattccgcatttgtcgataatcataagtatcgaccccgcaggtgtaaacgtaaaaacccgatctcattctaaaacagtgactaactcgctgttttactaggctttatcgcattaaaaaatcacaacccaaaaagttgcttagtttcgctgtgcggaatactattttgttttgttgattttataaaaaaatgaggcttaacatgcgccgtcgaaacccggactcggacaacaacgaagtcccagcaggcaacaacgctttcgagcatttgttgattgacccgatgcacaacgaggaggaggaagacaaggaccgccagttcgtcaccgccctggcccgcggcctggaactgctgcgctgtttcacgccgagcgagagtgtgctgggcaaccaggaactggcgcgcaagaccgggttgccgaaaccgacgatcacccgcatgacccacaccctgacccgcctgggttacctcaggcacttgccccagtcgggccggtaccagttggacgtgggcgtgatggccttcggttacgccatgttgtcgaacctgtcgatccgcgccgtggcccacccgttgatggagaccatggccaagtacgcccaggcggccgtcgcgatggccacccgcgaccgcctcgacgcagtgtacctggacgtggtccagggtgaagccaacatgaccatgcgccgccaggtcggcacacggttgccgttgcacttgagttcagcaggccgcgcctgcctggcagcgatgccggaaaacgagcgggagttcattctcgaccacatccgccagcgtcatctggaggactggccgaacatccgcaaggggctggaacgcgccttccgggactacaccgatttcggctattgcatgtcgatcggtgagtggcaccgcgatgtcaatgccatcgccgtaccgctgcgacacgcacaacacggcttgctggcgttcaactgtggcggaccgagtttccacctctcccgggagaaactcgaagacgacatcggcccccgcctcaagcacatggtgaacaatatcgaggccgccacccgttagctggaccggtgcatggcctcggcagattgacgataacaggcccgccgaacgggccgctgagggcggcacatgatccgagacgcacaaaccctgcatatcctggtggacgccattgcgcagttcgtcgatgacgcgctgatcccacgggaaaacgaagtcgccgagaccgatgaaatcccggccgacatcatcagccaattccaggacatgggcctgttcggcctgaccatccccgaagcctacggcggccttggcctgaccatggaagaagaggtgaccatcgcctttgaactggggcgcacctccccggccttccgttcgtacttcggcaccaacaatggcatcggctccatcggcatcctgctcgacggcaccgaggcgcagaaggagcactacctgccgttgctggccagcggcgcactgcttagttcgttctgcctcaccgaacccgactccggctccgacgctgcctcgctgaaaaccaccgccgtgcgcgatggcgaccactacgtgatcaacggcaccaagcgctttatcaccaacgcaccccacgccggaattttcacggtgatggcgcgcaccgacccggcgattcgcggctcgggcggtatcagcgcgtttatcatcgaacgtgacacaccaggcctgtccctgggcaagcgcgatcacaagatgggccagcaaggcgcgcacaccagcgacgtgatcttcgacaacgtgcgtgtgccggccagccagttgatcggtggcgtggaaggcgtgggtttcaagaccgccatgaaggtcctcgacaaaggccgcctgcacatcgccgctgtcagcgtcggcgccgccgagcgcatgctgggcgacgcgctgaactacgcgatcgaacgcaagcaattcggccagccgattgccgagttccaactgatccaggccatgctcgccgacagcaaggccgaaatctatgcggcgcgctgcatggtgctcgacgccgcgcgcaagcgtgacgaaggccaggacattggcaccgaagcctcctgctcgaagatgttcgccaccgagatgtgcggccgcgtggctgaccgctgcgtgcagatccatggcggcgccggctatatcagcgagtacgccattgaacgtttctaccgggatgtgcgcctgttccgcctctacgaaggcactacgcagatccagcaactggtgattgcccgcaacatgattcgcgcggcgcaacgctaagcaccacccatacccaatgccctaacaactacaacaaggtatcgctatggaagtcgccgcatcggcgggcgcgttgtcgcctgcaaaaagcaaactgtggatcattgtctttatcttctgcttcctcggcctgttgatcgatggcgcagacctgatgctgctgtcctacagcctcagcagcctgaaggccgagttcggcctgaccagcgtcgaggccggcagcctgggcagtttcaccctggccggcatggccatcggtggcatctacgggggctgggcctgtgaccgcttcggccgggtcaaaaccgtggtgtggagcatcgtgctgttctccgtgggcacggcgatcctgggcatgacccacagctattggcagttcgcgagcacgcggttcttcgcctccctcggcctgggcgcgctgtacgtggcgtgcaacacgttgatggccgaatacgtgccgacccgctatcgcaccaccgtgctcggcacccttcaggccggctggtcggtgggttacatcgtcgccacgctgctggccggttggatcctgcctgaacacggctggcgctggttgttctacgtggcgatcatcccggtgatcctcgccgtgttgatgcaacgcctggtgcccgagcctcaagcctggctgaccgcacgggccgagcgcgcgcaggagaaagccaatggcacccggcacgccctgcagagcaagcccgacggcatgttcaagctgatcttcagcgaccccaaagccagccgcatgttcctgctctgggccctgaccgcaggcttcctgcagttcggctactacggcgtgaacaactggatgccgtcctacctggaaagcgaactggggatgaatttcaagtcgatgaccagctacatggtcggcacctacgcagcgatgatcttcggcaagatcctcgccggtctcgccgcagaccgcctgggacgacgtaccgtattcgccgtcggcgccctgggcacggcggtcttcctaccggtgatcgtgctgttccagagcccggagaacatcctgtggatgctggtggtgttcggcttcctgtacgggattccctatggtgtgaacgccacctacatgaccgaaagcttcgaagcgaagtttcgcggctcagcggtgggtggggcctacaacatcggccgtattggtgcggcagtggcaccggcagcgatcggtttcctggcgtcccatggctccatcggcatggggttcctggtaatgggcggcgcgtacttcatctgcggcgtcattcctgcgttgtttatccgcgataaacagttcgatccgcaaaaacagtaagcgcggcgtccgtttgccaaataactggcgtcattcttcggcgactgtttttagcgataaaaacagtcgcttgatttgtaaggctttttatttaattgaacgaatgtggcatgaatctcgctctaaccctgttcaagcaggttaagcgatgacaagacgtgcggcagtgcccaggggttataacccatggtaaagcggtctaaactgtaactcatgttttacggaactgaaggaacagtaagacgcttggcattcgccactctcatcgagcctgtaagacagttgagtgcttagaggcgaaacggttatgaaaacacctacccagacccatgcaattgactttgacagtgccaaattgcaacgcctgggctttggccaacccgccctcctgccgcgccgccccaccaccgttatcgaacttcgccagcaactgggccagcaactgcaaaccagcctggaaccggagcgcattctcgcggtgttcttccgtgagatccaacgcctggtgcccttggacgccctgcactaccgtcaccaagccagcgacctgcgcctggagttcggccatcgcggtcatcactcgatgagctacagcctgagccatgaaggcgagcacctgggcgagctgatctttcggcgcaaccagcgcctgcaggaagaagaactcggccagcttgagtccctgttggcgaccctgctctacccgatgcgcaacgccctgctctaccgcgccgccacccgcagcgcgctgcgtgacccactgaccgagaccggcaaccgcatcgccatggaccagaccctgcaacgggaaatcgacatggcgcgccgccacctcaatccactgtccttgctgatgctggatattgaccacttcaagagcatcaacgacacccacggccacgccgccggcgataacgtgctgcgcactgtggcgacatcgatcaagagccagttgcgtaacgtagacatggtgtttcgttatggcggggaagagtttctgatcctgctgtccaacaccggtcgcgatgcggcggcgatggtcggcgaacgcctgcgccaggcagcacaggcccaggattactgggcggacggaacacggatcgaattgacggtgagcctgggttgctcgaccttgctggcggccgaatctgccgaaagcctgctgcgccgggccgatagtgcgttgtacgtggccaagcgcgaaggccgcaaccgcctggcgatggcggggtaacccccgccatctgctctgcatcaggcctcgctggcaacccgcgcctgacgctcacgcatcaccgcaggggctttttctttctccagacgcatgcagctttccaggaacaaatacatgtagtcatagcttttgcacacagcctggcgcagttctgcctgcaatgccttggtcgggttcatcccggccagggtgcagatgatctccagcgcttcccacgggtgggcgtcatcgtactgggcatgcatcttcaaccacttcatcgcacgcttgcgctcttcctcggggaaggccgccgcgtagacaccggtggaacacaccacggcggaccactcaccggtcgcgccttcgatcgcgtagttggtcgcggcaatggccacgatcagcgaatcggcagaactggtgtgccagcaccaatggctgagggcgtgcaactccggcggcacgtcctgggcctgtaactcgtccaggctcacgccgtgggcacgggcccaattgacccaataatcggcgtggttgagttccacacgaatattgcgcatcagccagcggcgcgccatgtcctccccaggatggcgggcaaatttggtcttggtcaggttctgtgccatgtacaaggcaaactgttccaccaccggccagccaccgatcaggtagtggcgcagggtcttggcgctgagcgtgttgtcgcgcatgcgctggtacagttcgtgttcgacaactcggcgcttgctctcgctacagtccaggatcagtttctgagcccaggcggggtaactcgaggcttccataagcgggccggttctgttgaatgtgtcgatcactgtaaggctcctttttaagtgtgattgtacagaccagcaaagttttcagcggaatgtgccgggcgccttgaataacagaggctgcggccgcacaggtcgacactgcaagctatcaaaggtaaacaattgcggtcgttcaatcaggtagccctgagcgtaatccacaccaatttcgagtaacgcctgttcgatgtgcggtgtctcgacaaattctgcaattgtgcgcttacccatgacatggccgatgtggttgatcacttcgaccatcgcgcggttaatcgggtcgtccagcatatcctttacgaaacttccatcgatcttcaggaagtctacaggtaaatgtttgagataagcgaatgaggacattccggcacaaaagtcatccagcgagaaatgacagcctaaggctttgagttcattgataaagcggatcgcactgcccaagtttgcaatcgcactggtttcagtgatttcaaaacagatcatgcccggcggaatattgtatgtatgaaacttctcacgcaaaaacccaaggaagtcatcatcaccaatggtgatgcctgacagattgatcgcacacatggccatggggcgccccgggcgttcctgcatgcagcggttgatgatcttgaacacattctccaccacccaacggtccagcgacgtcatcaagccatagcgttcggcggccgggatgaagctgtccggcaggatgatacggccagcctcgtcatgcaggcgcagcaggatctcgatatgcccattgccgccgtcggtgtgccccaggggtgagatttcctgggcgtagaggcagaaccggttctcctccagggccatgtgcaggcgctgcacccaggccatttcgccaaagcgcacggacagttccgaatcgtcggcgtggtacacctgcacacggttacggcccttttccttggccatgtagcatgccatgtcggcggcgcgcagtgaggtttccagggttgtcggggtatgcccaaggtgcaccaggccgatgctgacggtggtcatgaacggccggcccttccatacgaagtgcaggctttgcacggtgtggcgcaggctctcggcgattttttcggccaccgccgccgggcagttctccagcaggatgccgaattcatcgccgcccaaacgtgccagggtgtcaccttcgcgcaggtccgattgcaacaacgcacagatgtgccgcaacagctcatcacctgcggcatggccacaggtgtcgttgaccagcttgaactggtcgaggtcgaggaacatgagtgcatgccgcccgccctgctgcgaccccgtggggtgaagcacctgttccaggcgatactcgaactcacgacgattggccaggccagtcagggcgtcgtgggtcgcctgccaggacaggttggcgatgtattgacgctcctgggtcatgtcgtgcaacaccagcaccgccccggtcaccttgccggcgctgcggatcggcgcgcccaccagggtcaccgagaccgtactgccatccaggcgctggatggttttcgagtgctcgctgccgccgccaagctggcccttgacgatatgttcgatcaaggtaaagccatcgggctgggcattgtcatccagcaggttgaacagggccgccaggggcagcccctgggcctgggcagaattccagtgggtcagcgcctcggccgccgggttcatgtaggtgatggcaccgtcaacatcagtggtaatcaccccgtcgccaatcgactccagggtgatctgcgcccgctccttctcttgttgcagggcgtcggcaaaggcgtggcgttgggccagcagtttatgcgtgcgcaacagcgccagcacaatcaggcccaacgccgtggccaggttggtgatcaccagcagccgcaggatcatccgcgaaccttcgcccagggcatcgctgaacgccttggcagcgggcgtcacaccttcgttgatggcagtgatatgtgccttccattggcgcacatcgttggcgctgacctggtcgcggctgattgcaccgtgcatctcgcgggccaggtcatccagttgcaccagatagccatcgcccacggtccacagctcgatggctttttccaggtagctgaaatggcggaagttgaggtacagccagatcaggctggaaacgtcatccgggtggttaccgcccttgaggatgcccaggcgcgcggcagcaagatcaggggtggagcggtccagggcaatacgcaattcatgcccgccctggggcacggcgatcgcctgctggtatttgagataagtggtttcgtcgcggttgtcggcatacagcgtcaggtagtagatcgcatctttctggcccttggaccacaggctttcgccagccacataaccacgcaccgccgagagcacgtagaggctgacgcaacccaacaatgcctggaacagcaccacggcgataaagggccagacaatgcccaacaaccgtggcgttccgagagtccgcttttgcttcatgaagccccttgcacatgcactgctggatacgcacgcgaaacaccgcttccgatagctcagcctaggctaaatcaacgtacttgttgcaagtgcccgtagagtttggcgtacaaaccaccgtcagcaatcaattgctgatggtcgccatcctctgcaatgtgaccgccgtcgaacactaagactcgatctgcctgcttaaccgccgacaggcggtgggcgatgatcagtgtagtacggccgctgaggaagcgcgccagcgcctggtgcaggttgtactcggtggcggcgtccagggcggaagtcgcttcgtcgaggatcaccactttcggttcggccaacaccatgcgcgcaatcgccaggcgctgacgctggccgccggaaaaccgcaccccggaacgccccaccacactgtccaggcccatgggcaacgccttgaccgtcgcatccagttgggcgatttccagtgcctgccagcaggcctggtcactgcgctcgcggcccatagtcaggttggcgcgcacagtgtcgttgaacagcgcgggatgttgcagcaccacggcgacgtgctcgcggatggtctccaggccgatgtcctgctgggtggcaccgccaaagcggatagtcccggcctggggcgtgtacaggcccagcagcagttgcaccagggtgcttttgccaccgccgctggcgccgacgatcgcgaccttttcccccggtgcgatggccaggttcaactggtcgaggaccaggtcttcgccataaccgaaactcaggccacgcacttcgatgccgacggtttcgcgcccggtgaacgggtcttcgccgcccgcatattgcggctcatcggcccgtgccagcagctcgttgatccgcgtcagcgccccgcccgccgcatagtaggcatattgcaggttcagcaattgctccaccgggccgatcatgaaccacaggtaactgaacaccgcgagcatctggccgatggacaagtcggaaaacagcaccgtgagcatggccgccgcacggaagatgtcgatgccgaactggaacagcaacccgctggcgcggctggaagcatcggttttccactgggagtggatcgcgtagtcgcgcacttcctgggcccgctggccgaggcgcccgaggaagaagccctggcggttgccggcgcgcacttcctgaatggcgtccagggtttcggtgagtgcctgggtaaaccgcgaagtgctgtcgttttccagcttcttcaggtgtttaacgcgtttacccaactgcaccgtggcgtagatcaccagcgggttgaacagcaggatcagcagcgccagttgccaatgcatccacaccaggatcgccgacgtgcccaccagcgtgagcatcgccaccaggaaccggctgagggtttcgccgacgaatttatccagggtatccaggtcggtgaccaggtgggtggtgaccgtgccactgcccaggctttcgtattcgccgagggaaatacgcttgagccgttcgatcaggcgcacgcggatgcggtacacgatgtccttggccaaccgcgcaaacaaccgcgcctgcaccacgttgaacaccagcgcgccgcagcgcaggaacagcgtcaccagcaacatcaggccgatatagccggcggccttctgccagcccaggggcaaggcgtggttcatcactttgagtgcggcatcgccacgacccagcagcacttcatccaccagcaacggcaataacagaggaatgggcacgctgcacagggtcgccagcacggcgacgccattggcgatccacagggacttcttgtggcgcagggccaggcggcgaatttccgcccaggtcaggcggtcagtgcgttgaggttgctcatgcacaggtggctcgctccagccatcggcccagtagcggcgatagctcggacagcggctggtaaccgttggtcagcaacgccaactggccattgcgctcggccagcagcgtggggaaaccggcgatacccaggtcctgcacccaggtaaaatcggccgctgtggcggcgtgctgctcggcgcggtcaaattcgccggcaaactcgatgcgcgggatacccgcctgctcggccagctccaccagcacactggcgagggtcacatcgcgaccttcgacataaaacgcacgctggatcagccccagcagcttccacgcgcaatccggcgccaggctgcgcgccgtgacgatggcgcggcacgccggctcggtgtcatacacaaaaccgtcgggcagtgcgccgtcacgcttgaacggctggccggtggcgtcggtcaccgcctgccagtgctccaggatgtaccgtcgcgtggtcggctccagcgccgcgccgctgccggtgcgcaagccgcccaccaccagatgcagctccacgccggccgcctgggcctgctccaccaacgcctcggccaccggggcaaagccccagcaccaggaacacatcgggtccattacatagagcaggcgcgcggacatggctcaggcctcggaaggagtttgcttgtaattgaagccaatcgggtgcggcatgttacgggccttggccagctcgatctgcttctggcggtcaatcgcactgcggcgggtcttctccggcagcttatcccagcagtgcgggcagctgatgcctgcgacatagtgctcggaggcgcggtcctcaacactcacgggtgtgcggcaggcatgacattgatcgtagtcgccttcgctcaggtcgtggcgcacggtgacgcgattatcgaaaacaaagcagtcaccctgccatttggtttctgcctgcggcacctcttcgaggtacttcaggatgccgcccttgaggtggtagacctcatcgaaaccctcgctgagcatgtagctggaggccttctcgcaccgaatgccgccggtgcagaacatggcgaccttcttgtgcttggccgggtcgaagttggctttgatgtagtcgggaaattcgcgaaaactggtggttttcgggtcgattgcgccttcaaaggtgccgatcgacacttcgtagtcgttgcgagtgtcgatcaacagcacttccgggtcgctgatcagcgcgttccagtcctgcgggtcgacgtaggtgccgaccttcttgttcgggtcgacgccttcgacgcccagggtcacgatctctttcttgagcttgaccttggtgcggtagaacggctggtcgtcgcagtaggattctttgtggtcgatgtcgaccatccgcgggtcgttcttcagccaggccatcaagccatcaatgccttcgcggctgccggaaacggtgccgttgatgccttcttcggcgatcagcaaggtgcctttgatgccgttgtcgaccatcgcctgcagcagtggctcgcgcagggcgacgtaatcttcaagggtgacgaacttatacagtgccgccacgacaatcggttgagtcatgggtgttctctccaggtggctaccctcgtaaggggtgaaccggatgcaaaaaaaacgcgccggctaggcggcgcgttgcggattctaacaaatgcccggtgtcagagacacccgatcatcaatcatgcccgccggcgcaggtcggcgaggccggggctgcgtcgattttcgcccattcatcaggcgtgtaggtatgcagcgccagcgcatgaaactcgctcatcaggtcacccagggtggcgtagaccttctggtggcgcttgacgcggttgagcccctcgaactgcgggctgaccagcacggccttgaagtgggtctgcaagccacggctgtgcatgtggctttcatccagcacgctcaagtggtcggtgcccagggcggcaagcgccgtttcgatacgctgttgcatggtcattcctgcttacttcttcttggccggtgcggcggctttaggtgtcagctcgttggtcatgtcttccaacagcttgttcaccaccggcacggcgctttccagcttggcctgggtcatctgggccgattgctgggtcagttgcggcattttttccaggactttcttgcccagtggcgactggtagaaggcaaccaggtccttgagctcggattcgctgaagttggtggtgtagagcttgaccatgtccggcttcagcttcggccagccgatggcctggtcgagggcggcgttggccttggcctggtagctgtcgagtacggactgcttggcggcaggcgccttggtctgttcgaaacgctgggcgaacatttgctgcacttgcatgtacaccggggtacccagcttgtcggcatgggccagggtaaggaaggcttcggcactggcgttgtggctggcggtatcggcaagaacctggccgctggcgcaaaccagagcaaccgcggtacagatggcacgaagacgagtcatcgagtttccttttctagcaggcgaggtaagaccccaagggcgcccattctgcgcctaaaaaaccttggggctcaaccccgggccttgtcggacaaggattgcccgatgaaaagtctttcaggggaacccccaaggctgatcacagcctaaactgcgcaaacgaacctgaaggagtgtgcccgatgagccgtatcgaaaccgacagcctgggagaagtccacgtcccggatgacgcttactggggcgcccagacccaacgttcactggtgaacttcgccatcggcgagcagcgcatgcccctcgcggtattgcacgccctggccctggtcaagaaggcggcggcacgggtcaacgaccgcaatggcgacctgcccgcggacatcgcccgcctgatcgaacaggccgccgacgaagtgctggccggccagcacgacgaccagttccccctggtggtgtggcagaccggcagcggcacccagagcaacatgaacgccaacgaagtgatcgccggccgcgccaacgaactggcgggcaataagcgcggcggcaagagcccggtgcaccccaacgatcacgtcaaccgttcccagagctccaacgactgtttccccacggccatgagcatcgccgccgtgcaggcggtgcatcaacgcttgctaccggcgattgccagcctgtccggcgggctggcggagcaagccgccaaacatatgaagctggtgaagaccgggcgcacccacatgatggatgccacgccgatcaccttcggccaggagctttcggcattcatcgctcaactcgactacgccgaacgtgcgatccgcgccgccctgccagccgcatgcgagcttgcccagggcggcaccgccgtgggcaccgggctcaatgcgccccatggcttcggcgaggcgattgcctcggagctggcggcgctgtcgggcttgccgttcgtcaccgcgccgaacaaattcgccgctctctctggccatgagccgctggtgacgctgcacggtgcgctgaaaaccctggccgtggccctgatgaaaatcgccaatgacctgcgcctgctgggctccggcccgcgcaccgggctggccgaggtgaaattgccggccaacgaaccgggcagctcgatcatgccgggcaaggtcaacccgacacagtgcgaagcactgtcgatgctggcctgccaggtgctgggcaatgacgtgaccatcggcattgccgccagccagggccacttgcagttgaatgtgtacaagccggtgatcatccacaacctgctcgagtcgatccgactgctggccgacggctgcaacaacttccaggaacactgcgtggccgggctggagcccgacccggtgcagatggccgagcacctggagcgtgggttgatgctggtcaccgcgctcaacccgcacatcggctacgacaaatcggccgagatcgccaagaaggcctacgccgaagggttgacgctgcgggaggccgcgctggagctgggctacctcaccgatgcggagttcgaccagtgggttcgccccgaagacatgctgggcgcctagcctaggatgccatgcgcaaccgccgggccttgagcccggcgagcaacgacggcgccagcgccacggtcgccgagcccagcaccaccaccaacgccccggcatagcccagggcgttgatctcttcggcctgcacatagtcgggccacagccaggccgccagggccaccgccacaaaggtcaccaacggcgtgagtgccagggtcgcactgacccgtgaggcctcccaatgggccagcgcttcggcaaaggcgccgtaggccaccagggtattcatgcagcacccgagcaacagccagccttgcagcgggctcaggtccaatgcctccagcggatgcgcccaaggcgtaagcaatatggcgcaggacaggtagatcaccatcatcacctgcagcgagttccacaccgtcaacagttgtttctggccgagggcatagaacacccagatcgtggtggcgagcaggatggtcagcacgccggcggtgtaggcgccgagcgaggtcagcagttcttccaggcgctggttgaagaacaggccgaatcccaggatcagcaccaccaaccccaacccctgccccaggctgaagcgctccttgaagacgaacacactggcgaccatcaaaaagatcggccccatctgtaccaccaattgcgcagtgccggggctgagcaatttcaggcccaccaggtacagcacgtagttgcccaccagcccgcacaccgccatcgccaccagccagccgcccttggggccgagtaccttgcggctgggcagacgtttggtcagcgccaggtagatgaacaggcaactgccggccacgatcaggcgaaaccaggtgacggtgatcgggtccatcacctgcagcacctgcttgagtttgatcggcagaatgccccacaggaacgcggtcagcagggtcaggagaaaaccatagacccagcggccggaagagatgtgcatgagtaccccagaagccggaggaagtggagccgcattctaggggcacccgatgcactttgtgtagcgaacacttaacttgccgatcagcgcaccgcttcgaacaacccggtggcccccatgccgccgcccacgcacatggtgacgatgccgtaacgcaggttgcgtcgctgcaactcacgcaccaggtgccccacctgccgcgagccggtcatgccgaatggatgaccgatggaaatcgagccgccgttgacgttgtacttggcattgtcgatttccaggcgattgcgcgcatacaggcactgcgaggcgaacgcttcgttcagctcccagaggtcgatatccgccacctgcaagcccttggcctggagcaacttgggcaccgagaacaccgggccaatgcccatctcgtccggctcgcaaccggccacggtgaagccacggaaaaacgccttgggcttgagccccaacgccagggctttttccaggctcatcaccagggtcatcgaggcgccgtcggagagctgcgaggaattgcccgccgtcaccgagccatcttcggcaaacaccggcttcaaaccttgcagactcgccagggtagtgtccgggcggttgcagtcgtcacggtcaaccacgccatcaagaatctgcacttcaccggtgtgcttgtcctcgaccttgtacttgaccgccatcggcacgatttcatcgttgaacagcccatcggcctgggcctgggcggtgcgctgctggctttgcagggcgtacaggtcctgttcttcgcggctgacgttgtagcgacgcgcgacgatctcggcggtctggcccatgggaaaatagatacccggcacctgctctttgagcagcgggttgatcaggttgtcggtgttgacgcttttcatggtcaggctgatcgattcgacgccgccggcaacgatgatatcgctgcaacccgaagcaatctggttggccgcaatggcaatcgcctgcaagcccgacgagcagaaacggttgagagtcatgccggctacgccagtgcccagttgcgaaagcaccgccacattgcgcccgatgttgtaaccctgggcgccctcgttggagccggcgccgacgatgcaatcctccaccgtcgccggatcgataccgttgcgggtgagcagcgcgttgacgcaatgggccgccatgtcatccgggcgggtctggttgaacttgccgcgaaaggacttggccaggccggttcgcacgctgtcgacgatcactacttcacgcatgggctacctcgatcttgtggttgttggatcgagcatagatcccaccctgcgccatcgcgacgatcattcaccccatagatacaaaaccatggcggcccggctcaccgtggcgagcaggcttgttgtggcgagcaggcttgccctgcgttggggcgcgaagcggccccgaatcaggcaccgcggttcttcaggcacgactgagttggcaggttttagggctgcttcgcagcccaacgcggggcaagcccgctcgccacaacgagctgcatcattatttctttttctttttgtcgtgcttgtcggacttggcgaacgcctcttccagcgccaggttgatcgtgcgcaacaccttgacccgcgcccagcgcttgtcattggcctccaccagggtccagggcgatacctcggtgctggtgcgatcgaccatatcgcctaccgccgcgcggtagtcgtcccatttgtcgcggttgcgccagtcgtcttcggtgatcttgaagcgtttgaaagggatttcctcgcgggcctggaagcgctccagttgcgtgtccttgtcgatggccagccagaacttgaccacgatcacaccggcatcgcgcagttgctcttcgaagtcattgatctcgccataggcgcgcatccagtcggcaggggtgcagaagccttcgatgcgctccaccagcacgcggccataccaggagcggtcgaacacggtgaacatgccgcgtgccggaatcttctgccagaaccgccataaataaggctgggcgcgctcgtcttcactgggcgcggcaatcggcacgatgtggtactgacgcgggtccaacgccgctgccacccggcggatcgccccacctttgcccgccgcgtcgttgccctcgaacaccgtgatcaaggcgtgcttgcgcatgcgcttgtcgcgcatcagtccggagaagcgtgcttgttcggtgatcagttgttcttcgtaatcgtccttgtccaggcgctgggacaggtcgaggctgtccaacaggctcttcttgtccaccgaggcgatcaagggcgccgggttcatgccgctggccttgcccttgggcagcttgagcgcattctgcaggccttcgagcaggagtttgcccacggtgaggctgcggtagttgctgtccacgccttcgatcacatgccacggcgcatagtcgcggctggtgcggcgcaacacgcgctcgccgaagtgcacgaatttgtcgtaagtctcggattgctgccagtccagcgggctgatgcgccagctgtgcagggggtcatcggccagggccttgagccgcgctttcatctgctttttggagaggtggaaccagaacttgaagatcagcgcgccttcatcgcagagcatcttttccaggcgttcggcgccggcgatggcctggtccaggcgggcgtccttgatctgcccatgtacacggctttgcagcatctggctgtaccagttgccaaagaagatacccatgcggcccttggcgggaagttggcgccagtagcgccaggccggcgggcgcgccagttcttcgtcggtctgctggtcgaaggtgcgcacttcgatcaggcgcgggtccatccattcattgagcagcttgaccgtctcgcccttgccggcgccttcgataccgttgatcaggataatcaccgggaagcgcttctgctgctgcaactcgtactgcacctccagcaaggcttctcgcaatgcaggcacttcggcctcaaaggtgtctttgtcgatggcgtgaccgatttcggcggattcgaacatgggcagctccgtttcaagatggctcaagactagcggattgggcaacaacacgcgggaggaaattccaccggcgcttgccgtgggtcaattcaacgtcggttgatcggctagaatgacggccttgtctttaccgagccgcccatgaaccctatcacccacgcccagctcgactgggatgaccaaggtcgcccgcactcgcgaatcttcgacgatgtgtacttttccgataagtcgggccttgaagaaacccgctatgtgttcctcgaacagaaccgcttgcaggagcgctttgccgcgctgcccgccggtgggcggctggtgattggtgagaccgggttcggcacggggttgaatttcctctgcgcctggcaactgttcgaacaacacgcggtagccggtgcgcgcctgcatttcgtcagcgtggaaaagtatccgctgagccatgccgacctgcgacgcgccctgctgctctggcccgaactgcaccccttcgccgaacaactgctggcgcaatacattgccatccatcagggcttccagcggctggtgctggataacggccgcgtgaccctgaccctgctgatcggcgatgccctggagcaactgccgcaactggatgcgcaaatcgacgcctggttcctggacggcttcgccccggcgaaaaacccggagatgtggaccgccgagctgtttgccgagctggcacgcctggcggcgccgggctcgaccatcagcacgtttaccagcaccggctgggtgcgtcggctgatcaacgccgccgggttcaagatgaaacgtacgccgggcattggccacaagtgggagatcctccgtggggagtttctcggttggccggccgacacaccggtaccggccgcgaccaagccgtggttcgccaggccgcccgcccttgcgggtgagcgtcacgcactggtgatcggcgccggcctggcgggctgcgcgacagcggccagcctggcggccaggggttggcaggtcagcctgctggagcgccatgacggtgtggcgcgggaagcctccggcaacccccagggcgtgctgtacctgaaactgtcggcccacggcacagccctgtcgcagttgatcgtggcggggtttggctacacccgccgggtgctggagcacctgcatcgcggcgtcgactgggacagttgcggcgtgctgcagctggccttcgacgccaaggaagcccaacgccaggcgcaactggccgctgctttcgcgccagacttgctgcacctgctcgaccgcgaccaggcccaggcccgcgccggtgtcgcgctggcgcacggtgggctgtttttccccgaaggcggctgggtgcacccaccggcattgtgcgaatggcaagcacaccagccgggcgtgaccctgctgccctaccacgatgtgctcgacctgcggcacgtcgacggtcagtggcaagcctgggacgctgagcgcctgctcgccagcgccagcgtggcgatcctggccggcgccgccgaggtccagcgcttcgccgacctgcccctcaagcgcattcgcgggcagatcacccgtttgccgcagaccgcctacagccaggccctggccacggtggtgtgcgccgaaggctacgtcgccccgccacgcctgggcgagcacaccctgggcgccagtttcgacttcaagagcgatgaccttacgcccaccgccgctgaacattccgggaacctggagctgctccagggcatttccgaagacctggcccagcgcctgggcgccgacagcctggcgccggaagccctggaaggccgcgccgcgttccgctgcaccagcccggactacctgccgattgtcgggccattggctgaccgccaggcgttcgaccaggcctacgccgcgctgcgcaaggacgcccggcaagtgcctggcgccgcctgcccgtggctggacgggttgtatgtcaacagcggccacggctcaagggggctgatcaccgccccgctgactgcggagctactcgccgcctggctggacaacgagccgctgccggtgccgcgcgcggtggctgacgcctgccaccccaaccgtttcgccgtgcgggcgctgatccgcaccaccaccggcaaggccgaatgatcaaccggccggggcctcacacacggggcccagcccttcggttctgatggcgtcctcggtcaagcgctcgatcagcacgctttcagcctgctcccgttcactgaggacggtgtgcatgcgactccggtaatcggcatcgctcagtaccaggctttgttcgaagatgtcattgaggcgctcatcatagggcgtgttcaaggcctcgaagcgagctgcatgggcacgcttgaggtagtcggtccagaacggcagcttcttgagatacgtcatcagctcgggggacagctcggccagcgtgacttcggccttggcttcatccagcgccaactgagtgacctcccccagccgcgaatagcgcatgtgtcgaggctggccgggcaaatagaattcgccgaccaggcctgtgcggaacgccaggctgacctccaatggatcggcggcaggatgcaggccactgtgacggcgcgcaatcgcctccaactgctccaggcgaaacaggccacgacccagtttcaacagcggcttgggcgtcagcgcacgcccctggatgagggccttggcatcgctgatttccaccaggacttccaggctgctgaagttgacggcggcggcatcgtcacaattgatcggcgtggcggcccggtcgaatacttcctcacgcagttcgctgttcattgcggcagcctccagcacccgccaaacgcgtcgctgcaggtcctcacgcacgaactcggcgtctttggtgccgcccagttccgcgagcaacttgaacagggcgtccgaccggtgatcgtccttgaggctcgtccacgtgagtttcttcgccgcatagcccgccatccgttcgtccgccagccacagttcgcgtgcgctctgctcgttcaagcgggcaatgtcatcttccaggaaccccatgcccggaccgtacgcctgacggtagtttttcagggccagttggctttgcgccgataacgggttgtgccgcaagttgacgccctgggcaacgtttcgcggcacgcgtagtagccactccggcagcacgctgatgtcattggcgcgcaaattgatatgttcaagataaggcaggcgccacaggtccctgggcagttccttgagtcggcagttgcgcaacaccaggctacgcagcgcgaacatacggctgatatccggcgggtccagcaacgggttgtccgccaggttcaacaccttcaggcgcgtcagatcggccagcttggcacgggtgtattcggtgagctggagtttgttgttgctcaggtacaaccgctccaggcccggcatgtgcaacagggcttcaggtagccgggtcatctggttttcgcctagttcaagggtgcgcagccccttgaagtggctgaggaaatacgccacatcgtcagtcaggttcaaacggcgcagtgacaaatgctcgacgtgatcgaaacgcacctgtgcgggcaatgtcggcagagggccgatgaccatatcatcgagcaacagcccaggaacctggctggcgtgctcatcgggcagggtcgacatccgtcgccagcacttttcgatgctcttcgccgcctggtggcggctcaatcgatagtcccacagggggtcggcctgcacgatattgacagacttctcggcacgccagcgtttgagtgccgtgtgcagcgcttcaaactcctgctcgcgtgcctggaccgccttggcacgcgacagatgatcatggcccgcatcgcgcaggaaatcgttgacctgcgacggactgagcaagggatagagtttgttgactttacgcaccaacgccgccgggaaatgctctgcctcggctcgcgccgcctgggtacagatcagcggctcttcgtccagcagcccgcgttccggccacaggtaacgggcgaccctgtcacgctcatgcaccgcggtagcacgcaggcggccgcgcaggtcggccgcctcgttctcggcctgaagcttcaatgcaatgcgctggcgtggcagcaggctatcgaaaagcgccgtgtacaagccgtccgcgcctgtcgcgaccggcccgagggccttgcctttttgatcgaatgcctgatacccctggggcgtactgaccagggtcctctgcgttgcagctgttgacgcgcccgcctcggccagcacctccccgctcagggtttgcctgcgcacctgcaacgccaggtctcggggccagccgggcatttgctgcagcataccgacggccacgcgtcgggtgccgtcccccgccaattccggccagtacaggcccatcagtgcgcggtcctgctccaacaggtccaccgtctcgcgcgcccgctgggcaagcaccagcggtacctggccggtggtgcgcaaataccggcgctcccataatgtggcctgtgagtacagctcccacgccatgcggggcggcagttgtttgaagcgctcgcacaacggcaccaattcgttcagggcaacaccggcgtaataggtgtacaaatggtcgaacacggcttgatgccggctacgcagcgtgtccagcagacgacgctccagcgtactgcgcatgtcgtcttccgccacacccttgcccaacaggtcgccacgttcctcgtcgctcaagtgctccagcaaggtgtccatgacccgcccgtccctcaactccttgcgggtgatatggatgctcaggtcctcataatcgaaaggtgctgtttccggatgcctttccagcagttcgccctcctcgtccagcacctcgaaaaaacgcccttggggccagcctggcaccagcggcaatgcaaacaattgcgcgcgtgcggtactcgcatcgggacgttcaccacgctccaggtactccatcagctcacgaaccctgtcgttttgcttatagcgcagcactgcgtcatgaaaacgctcgggtaacggctcgtaggcactgcccaacgcctgcaggtgtggcagggtcattcctgtgagggtcgccaggttcgacaatggctcagcgggcaattcgtcaaggcttggatccagtcgcctgaggctgtagacggggtcttcccattgcaaggggcgctcgtagacatgctgccagccaccacggaagttgtgctccagcggcgggcgataagcctgcggacgccgtggatggatgacccgccacttctgcaatcgggtatcgaacgcaaccgaatagtggtttccccccatgcggatgtaggagcggccgttgacttggtacacccctcgagaactggccacggcctggcgtgcgaccggctcaggctgtcgataggcattgagccttggccgccagagtttctggccctgatcggcagtgttgacggcttcgaacttctcgaagaactgcgcagacgttgtcagggtgcgcttcaacgtccccactacccgcccgcccgccacgaacaacgccatggccgcgatattttcagccacattcaccagatgcttgagggcctcggtatgctcatcgtgctgccagtcctcgacggcctcgaacacttcacccaacagctgtccgacggcgaccccgagcatcaactgccccaacaccggcaccaccaacgacgccacattcagcaggtccagccccaggtccagatagcgctgcatgcgctcttcactggcttgctggtcgacctgggccttgggtaccgccagtaccagcgcgtccaactgtatcttgccgacaaatgcctgaaagaagaacccggtcaggctggtcgtgacgggtaaggcacgcagctggccaaccttgcgcgtcatgtcgaacgagtcgaaaaaatccaggcggttgccctcatccacgtacccttcgaaaaacgtccggtagctcttgatttgcagcttcaaggacaaatacaccttgaagtcttccagcgtcggatactcgtaccagggcctggagggctcgttcggcatgtagacaataaaggggccggtatccaggctgcccggtgcgctgtcggaaaacaccaatacactccacacgcaggtgccatcgatgttcaagccctgccaattgatcaggccgttgcccggcagcctgctcctgagttcactggccggacgatcgaacccgatcagcttgagcaaccgcgcgtaggtcccggcttcgatatgccccttgcacaaggcaatatgcagatccatgcgcatgtccatgagtttgcccaggccaatactgacggcaacctggttgtaggagctgacttcctctttgcttttcgggtcgggcaggtcgaagacctcttcgatgtgcttttgatagagcgcccccaggtccagctcccggcaatgaccgacaaattcaggcaccgtcatccccaccatcggctgcctggtggccgcagagcgcactacagctgcgacggacatgcccccgggctcagcgcgctctgcagagaaattctgcatcgccgcatgcagcaggctttgcttggtataggtaacggtctggagcaagccgccgcccaggtccgggctcaccccagtgagcttgcgcctgggcaactccagcaggtctcgcctgacatccggcgactccacccctttggcccgcagaaaattggtcaagcgctctgcgcagtattgatccagcggttccaggcggctcaacaggtaacggacattctcacgaatcaccttgctgtcgatatgcgtctgttcaagggcggtgagtgtcgaagcgtcggcttcaaccaaccagtgcggcacggttttgcgcaaaacctgcgccttgtccaggtcggcggtgatgtcgagcaatgccctgtccagttcatcttgagtcgctcctgcggcgacctcactcaaatcgcgtttttgcgtcatcggcatgtttcctcagccagctgaacatgaagccaaacgataagcctggaccgggccgcatccgggtatctgtctaccgccctgcaaccaccttcatccgcttataaccgattgatctaaaactccacgaatagccccgtgtcagtttctgggtacgcgccctgtcgggcgtattgagttttatgctccccaacggaaaaaccggtaaggaatttatgtgcggattagctggagaattacgtttcgatgcccaacctgccgacctggcagcgattgaacgcatcacccatcacctggccccgcgaggcccagacgcctggggctttcatgcccaggggccgatagccctgggccatcggcgcctgaaaatcatggacctgtcggacggttcagcccaaccgatggtcgattcgcacctgggcctgagcctggcgttcaacggcgcgatctataacttcccggaattgcgagaagagctggaagccctgggctacgccttctattccggcggcgacaccgaggtgctgctcaagggttatcacgcctggggcgaggcactgctgcccaagctcaacggcatgtttgccttcgcgatctgggaacgcgatgcccagcgcctgttcatcgcccgcgaccgcctcggcgtgaagccgttgtacctgtcgcgcaccggtcagcgcctgcgctttgcctcggccttgccggcgctgctcaagggcggcgatatcaacccgatcctcgatccggtggcgctcaaccattatttgaatttccacgccgtggtaccggcgccacgcaccttgctggcgggcattgaaaaactgccacccgcgagctggatgcgcatcgatgccagcggcaagaccgagcagaagacctggtggaccctgccctacggcccacgcgaagatgaaaaaaacctgagcctggaagactggaccgaccgcgtgctcgatagcacccgcgaagccgtggccatccgtcaacgtgctgcggtggatgtgggggtgctgctctccggtggtgtcgattcgagcatgctcgtcggcctgctgcgtgaagtcggcgtacaggatttgtcgaccttctccatcggctttgaagacgccggtggcgaagccggcaacgagttccaatactcggacctgatcgccaagcactacggcacgcgccaccaccaattgcgcattgccgaaagcgagatcatcgagcaactgccggcggccttccgcgccatgagcgagccgatggtcagccatgactgcattgccttctacctgctgtcgcgggaagtggccaagcattgcaaggtggtgcagagcggccagggcgccgatgagctattcgccggttaccactggtacccgcaggtggacggtgcggccgatccctatgcagcctatcgcgatgcatttttcgaccgcagctacgacgactatgccgccactgtcgcgcccaaatggctgaccgccaacgatgcggcgggcgacttcgtgcgcgaacatttcgccatgcccggcgccgatgcggcggtggacaaggccctgcgcctggacagcacggtgatgctggtggacgacccggtcaaacgtgtcgacaacatgaccatggcctggggcctggaagcacgcacgccgtttctcgactaccgcttggtcgagctctcggcccgcgtgccgggtaagttcaagctgcccgacggcggcaagcaagtgctcaaggaagcggcgcgccgggtcatcccgagcgaagtcatcgaccgcaagaaaggctacttcccggtgccgggcctcaagcacttgcagggcgataccttgaactgggtacgcgaactgttgctcgacccgagccaggatcgcggcctgttcaactccgccgcgctggaccgcttgttgaccgacccgcagggccaactgacgccgttgcgtggctccaaactgtggcaactggcagcgctgaacctgtggctcagcgaacaaggaatctgattgatgaaacctctcgcagcggcctatagccaacgcttgctcaagggccaggcgccgacctacgagcgcctgcaggcgcgcctggcggaagacggcagccccctgggcgccgagccgattgcggtgcattgcggctggggccggttgttgatcgggcataccttccccgacccggccagcctggcccaggaactgctccatgagcagccgggtgagcgtgatatcgcgttgtatgtggcggcgccccagcagatcctggggattgatccccagcagctgtttctcgacccctccgacacgctgcgcctgtggttcagcgactatcgcccggctacccgggtgtttcgcggcttccgtattcgacgggtgcagaccgaggccgattggctggcggtgaatcagctgtaccaggggcgcggcatgctgccggtcgacgccgaacgcctcacaccgcgccatcaaggcggcccggtgtactggctggcagaagacgaagacagcggcgcggtgatcggcagcgtgatgggcctgaatcaccagaaggcgtttcatgacccggaaaacggttgcagcctgtggtgcctggcggtcgacccgcaatgcacgcgacccggcgtgggcgaagtgctggtgcgccatctggtggagcatttcatgagccgtggcctgagctacctggacctgtcggtgctgcacgataaccgccaggccaagaacctttacgccaaactcggtttccgcgcgctgaccacctttgcgatcaaacgcaagaatgggatcaaccagccattgttcctcggccctggcccgcaggcggggttcaacccctatgcgcggatcattgtcgaggaggcccaccggcgcggtatcgatgtgcaggtggatgacgccgatgccggcttgttcacattgagccatggcgggcgacgtgtgcgttgccgtgagtcgttgagcgacctgaccagcgctatcagcatgaccctgtgccaggacaaaagcctgacgcacaaggtgttgaaggccgccggattgaaactgcccgcgcagcaactggcgggcagcgcggatgacaacctggagttcctcgatgtgcaccagcgcatcgtggtcaagccgctggatggcgagcaaggccagggtgtggcagtggatttgcagagtatcgaggaggtgcagcaagccattgaagcggcgcggcaattcgacagccgtgtgttgctggagagtttccaccaggggctggacctgcgcatcctggtgatcggcttcgaggtggtggccgccgcgatccgccgcccggcggaggtgactggtgatggtcatcattccatcggtgcgctgatcgaagcccagagccgccgccgccaggctgcgaccgatggtgaaagcaaaatccccctggatggcgaaaccgaacgcacgctgaaagccgctggctatgactacagcagcatcctgccccgtggccaggtcctgtccgtgcgccgcaccgctaacctgcacaccggcggctgcctggaagacgtcaccgccatcctgcaccccacgctggtggacgccgccgtgcgcgccgcccgcgccctggacatccccatggtgggcctggacctgatggtgcccgccgccgaccaacccgagtacgtgtttatcgaagccaacgaacgggccggcctggccaatcatgaaccgcaaccgaccgcggagaaatttgtggatttgttgtttccccatagctgaacgatccgaccttaggagtctttatgagccgaaccatccccgaaccggatctgaactacctgcaaaaagtgctgctggaaatgctcgccattcccagccccaccgggtttaccgacaccatcgtgcgctacgtcgccgagcgcctggaagaactgggcatcccctttgaaatgacccggcgcggcaccatccgcgccaccctcaagggccagaaaaacagccccgaccgtgcagtttcggcacacttggataccatcggcgccgccgtgcgcgccatcaaggacaacggccgcctgagcctggcgccggtaggctgctggtcgagccgctttgccgaaggcagccgcgtcagcctgtttaccgacaacggcgtgatccgtggcagcgtgctgccgctgatggcctccgggcatgcgttcaataccgctgtggatgaaatgccggtgagctgggaccatgtggagttgcgcctggacgcctactgcgcgacccgtgctgactgcgactccctggggattggcatcggtgactatgtcgccttcgacccactgccggaattcaccgagagcgggcacatcagcgcccgacacctggacgacaaagccggcgtcgcggcgttgctggccgcactcaaggccatcgtcgacagcggcgagccgttgctgatcgactgccacccgctgttcaccatcaccgaggaaaccggcagtggcgcagcggccgccctgccctgggacgtcagtgagttcgtcggcatcgatatcgcgccggtcgcccccggccagcactccagcgagcatgcggtgagcgtggcgatgcaggattccggcgggccgtatgactatcacctgtcgcggcatttgctgcgcctggcgtccgaccacgagttgccggtgcgccgcgacctgttccgctactacttcagcgacgcccactcggctgtcaccgccggccacgatatccgcaccgcgttgctggcgtttgggtgcgatgcgacccacggctacgaacgcacgcatatcgacagcctggcggcgctgagtcgtctattgggcgcctacattctcagcccgcccgtgttcgccagcgatgcacagccggcacagggttccctggaccggttcagtcaccagatcgagcacgagacgcagatggagagcgacacgcgagtgccgtcggtggacagcctggtgggcaacaagtcctgagactggcaactacggtcccggcgcagtaggatcgccgggatccatcacccgaggcttgtatgctgattccctacgatgcacttgaagtcgagacgctgacgcgcctgatcgaagacttcgtgacccgcgacggcaccgacaatggcgacgacacgcccctggaaacccgcgtgctgcgcgtgcgccaggcgctgaccaagggccaggcgctgatcgtgttcgacccggaaagcgagcagtgccagttgatgctcaagcacgacgtgcccaagcatctgttcgactgacgtcagagattgggcaccggcaccggatgggtgctggggtcctggcgatcgcggattttctgatgcacctccgcgcgatgcacatgcaccccggccggcgcttcaacgccgagtttcacctgggtaccgttcaactcgaggatatgcacggcgatgtcatcgccgatggagatgacttcgcctatggcgcggcttaagaccagcatggcggttgtccttttaacagtgaaaggacctcgaccatgcgcgcaggctgtgctgcgcatcaatggcttgccgtgaaatcaggcactacttacatgtgtaggtaaaatacctgacagaccactacccgatcagcccttggcagcctgtgccttggcgcgcattttgtcggccatgctggtcatttcgtcatacagcaattgcgggttcttctgcttcaacgcccatgccatgcgcccctgctcgtggggcaggatcatgaactcgccctccgcgacccgctgatagatgtagtcggcgatatccgccgccgaaatcggcgagctttccagcagcttgcccacctgggccttcatggcgggggtcggcccacggaacgaatccaggagattggtctggaagaacgatgggcacaccacatgcacaccgatttcctgctgcttgagttccaccagcagactctccgacaacgccaccacaccggccttggccacgttgtagttactcatggccggcccctgcatcagtgcagccatggaggcgatgttgatgatgcggcccttgctcttttccagcagcggcaggaacgccttgcagcccttgaccacgcccatcaggttgattgcgatctgccagtcccagtcctccagggacaactcggcaaagaagccgcctgacgccacgcccgcgttgttgacgatcacatcgataccaccgagcttgacctcacaggcctgggcgaatgcggtgagctggctgtagtcgcgcacgtcgcagcgctggataaaaccttcgccaccggcctcgcgcaccaacctgagggtttcttgcaggccgggctcgctgacatccgacaaggccaactgccaaccctcacgggcccagcgcagagcgatttcacgacccaggccggacccggcgccagtgatcatcatgcgattttgcataggaagctgccttgtggttcacggaagaagtgatcggcagtgtagcgaaggtttttcctgcccccatccaccatcagagtgatgaatgcccctggcaaaccgtgggccgggtcggatgtttgcgtatagcctaagttcaatatttttcaactaataggttttagttgcgagcgcattaaaagaaataagcacgtttgcgaaatgctttaaaaaaatactgaattttctgcgaggggccatagtcggagttgttaaggcgtctgtctttaatatgcgggcctatcgttaaacaaccggtctttgcagaaggccaataaggaaaaaaaccatgagcctcattctgatcattatcctgatcctgctgctggtcggcggtttgccagtgttccctcactcacgcaactggggttacggcccgtcgggtatcctgggcgttgtcctggtggtgctgctggtactgttgttgcttgggcgtatataaacgccaggcaaaaaaaagaggccctttaaagggcctcttttttatggccgattaattagtccggcttgccgttgactacacccgcggtgttatccaacagactcttggtggccgtctgcaggaacgactcaagtttctgcttcagcgccgcctcgtccggcgactcggggattactttaccggtcgggttggcgcccagttcgtattcccacaacttcggtggcatttccttcggcagcaccagaatgcggtctgcggtcaccaacgccacggtctgatcgctgcccgatggcttgatcacgccaaaacccttatcgccttccggcaggttcaacaggtcacggccccagcactggtgcagggtatcgccaccaaggcggcccatgatggttggcacgatgtcgatctgggtgcccacggtgtggtcacgctcgccgaacttttcctgcatgcctggcgcgatcatcagcatcggcacgttgaaacggcccaggtccatttcggtgatctgctgctcgttgccgaagccatggtcacccacgatcacgaacagggtttccttgaagtacggctccttgcgggccttctcaaagaactggcccaatgcccagtcggagtagcgcatggcagtcaaatgctcgttgaggctgccacggtcggtgactttctctaccggcaatggcgtcggcaacgcatacggcgtgtggttggacagggtttgcagcaacgcatagaacggcttgccgccttcacgcgccttgagctcttccaggccacggttgaacatatcctggtcggacacgccccacgtcgggtcggagaacaccgggtcgacgaagtcattgcgaccgatgaagttggtcatgccctggttgctgaagaagcccgactggttgtcccaggcgaaatcgccgttgtacacatacacgtcgtcaaacttgcgcgcgctgagcaactgcggcaggcccgacagcttgtgggtgccttcgggggtctgcatcaggtattcgaagcccggcaggttcgggaagcacgccatggtggcgaacatgccctggtgggtatgggtgccgttggagaagaaacggtcgaacagcaggccttccttggacagtttgtcgaagtacggcgtgatgttgcctggacgacccaaggcgccgaccgagtgaccggcgaagctctccatgaggatcacgaccacgttcttgatcggcagggtcttctcggccggcggcatgtagtcgcggcgcacggcagcgatgtcggtatccaccagcttctcttgcggcagcaccagcatgtcacgcacggtctgggtagccagcggctggtcgagggtggccttccagatgttggaacggtcttcgccgaagcgggccttggccgccgcaatcagtgacaaggtgccattgaggcccaactggttggcgaagttggagtcggtggtgtacacatcaccccaacgcagtggcgggccttggcgcagggtgccacggatggcgaccacggcgatcagcaggcagaccacgaacaccgcgatacgcgtgtaccaaggcgccacctggcgcgtgccgatgctgccaccgctgaacgggccacgcggacgtgtggcgcggtcggcgcctttgaacgccatgctcaggatcaacgtacccacggcccaggccagcaggtagcgcaccaccggaaaaccgtaccagagcatgctcatcacggtcttggggtcttccttcacatactggaagaccaggccgttgaggcgctggtggaactcgcggtagaagtccatctccatcaggcccaggaacagggcaatgctggacgcgacggtcagccacagacggaagaacccacgcgcggccatggcgcggacgctgaacaaggccagcagcagcgggaccaacgcgtacatcacgaagcggatgtcaaagcgcgtgccattgccgaacgcttcgaggaaggtcgaggccggcgtgtcgaggatcatttcgcggttgtacaccagcagcgccaggcgcagcagggagaacatcaccatcatgaccagtgcgcagagcagcgtgtacgccagatgggatttgacggtcggttgcagcaggcgattagaagctcgctgctgactcagggcgtccgggtttgccatgtcgtttcaggacccattggaagtttaagtgacgaagtagtgcagtggcgcgaatggtgcccgatcaacggcggcaaggctattaattactgaacgtgcaccggcgctccgcctttagcggctcttgggatagggccttggcaggaagataaagccggcgaattgtcttggacgggatgtgaaaattttgtgcagcgaatatttcgaaacacaaaatgaattgaagggaaaagccatggcctggcagctgtcgagccggggttcgacagctgccaggccgggcgcgcgatcagatccgcacattaccccgtggcccggcaatcgcccagatgatcaggcccagcaccggcagcagcaggatcaacaggatccacaacaccttggcgcccgtgcttgcgccgcttttgaacacgttgatgatcgcccagatatccagcgcgaggatgatcagcccgatcaagctattgaacgtggaacccatggtgtcgctcctaagtgagggcatgcccttgtaggatagtcagccctggcgggggttccgttttatttcagacgtgaacggcgactttcagcgcttccagggacggttcgcccttgatgcccacttcagcgcacagctccagcacgcgcggcaggtcgttgccgtagaccagcaccgcctggatttcgtcatcgagcaactggctgaagttgagcaatacgtagccgccatcctcggggctgagggcgctcatctggatctggatgcggttgagtgcggtcaggtcttcggtcttggccagttgcttgggcttgaggttgaacgccacgccggggccgaacgacgcgacgatctgcgcgaacaggtcaccataggtgtcggcctggaacagtacggtgtccggcaggctgccgaccaccacccactcaccgagtgggatggggaaggtgtcgtcgtagttgatatccgggttggccgccagaaacgcggccgggtcggcgtaagcctgggccgcttcatcggcgatgcgcgccacctcgtcctcgcccatgacgccggcgctgattttgctgatgagttcgacgagggcggttttcatggaaatgatcctgtagcgggctggcttttgagggcgcgtagcctacaccagtttctgcaactgcgccgccgtatccaccgcgcccatggtctgcgcggcagccagtgcggtggcgccattggcgtcggtggccttggggttggcgccctgccccagcaggtaatcgaccatcgcaacgcggttgaacatcgccgccatcatcaacgccgtacggccgtcggcagacgcggcatccaccggcgcgcccccttcgatcagcgccttgaccacgtccaggttgcccttgaacgctgcaccagccatcggcagctgattcttgtcgttggcgatctgcggatcggccttgaactccagcagcacttttaccgcctcggcgtggccgtggtaggccgcgagcatcagcagggtgtcgccgttatggttgcgaaagttggccggcaagcctttggccagcagcgcagcgagcatggcggcgtcgcctttacgggcaacgtcgaagacctgttcggcaaattcggcagcttcgtcttcggtcatttgtttggcttggtctgacatgtggggctccttgtctggtgctttatatggcgcccagtgtcgcgagggagttcccccctgtcatggcttttttgtcaaaagcggccataggcagaatcaatagcgctcctttaatagcggaaatgcccaccctggatctgcgccagcaactgcccggtgaccggcacataactgtccgaccccggcagccaggcatagaccgggtcattgccggccttgtccgggtcgaaggcttcctccttgagccgcaccttctggtatttgaaggtgccggtggtttccatcttcaccttgatccgcaggaacaacggcacggcatagtgcggcaactgaccatgagcgaactgcagcaactcgcgcatgtccagggcagccagcgattcgctcggggtgatggcgaccataccggcgcggccattggtgttttcgatttccacgccataggccacgacttcagcgatctgcgggtgttgcagcaggatgttttccacttcggtggtcgagacgttttctcccttccagcgataggtatcgcccaggcggtcgacaaactgtgcatggccgaagccgatgctgcgcaccaggtcgccggtattaaagtagcggtcgcccttctcgaacacatccgtgaggatcaccttgcggtttttctccgggtcggtgtaaccgtcatagggagacttttcatcgatcctggccagcaacaagccctgcccgccggtcttcactttgtgcatgaagccatcgctgccacggatcggctcaccgctgtcgtgggcgtagtccaccaacgcccagtgctgcaggcaaaagccgacggtgttgtcgaaattcaatatgttggtgaaaccgatattgccgtcgctggcggcgtacaactcgcagacatgctccacgccgtaacgcgccttgaactgtgcccacacaccggggcgcaggccattgccaaccatcttggtcacgcggtggtcacggtcgtttccggtggccggctgatcgagcagatagcggcacaattcgccgacataaccgagggtggtcgctttgaatttgcgcgcatcctcccagaactggctggcgctgaacttgcgccggatagcgaacccggacgcgccgacaatcgccgagccccagcagacgcagaggccggtggcgtgatacagcggcagggtgcaataaagaacatcctccggccccatgtccagcgcaatgctgccgaagctgaccgcggtcttggtccagcggccatgtttcatgatgccggccttgggcagcccggtggtgccggaggtatagatatagaagcaggggtcgttgaagaaaatctgcgcggtactcggcgggttgtccaccgggcatccggcgctggctgccatcaggtcacagtaaccgtcgggcagcgcattgacctgctggtccgcgacaaaccaggtccgttccacaggaatgctcacctgctcacgtaccgcgtcataagaagccactaattctgcaccggccacaatcgccaccgggttcaccaggttgaggctgtgcagcagcgccgcctgggtttgcgcggtattgagcatcgcgcagatgccgcccagcttggccacggccagtacgctcagcagcaactcgggacggttttcaataaagatcgccactacgtcgcccttgccgatgccttgggcttgcagatggtgggccatgcggttggcctgttggttggcttcgctgtagctgactacgcggtcgccgtacaacaaggccgtgccatgcgggttacgcagggtggcttgttcaaaatgccagcccaggccacagggctgcgcggggtcggtgacattggcggcccgcatgccgcgcaccacgcgtggcaaagcgcgaacaatggccggcaccttccgcagcatcatgccccaggtgatcatgtcgttttgcgcgtggctcatgggaacatcctttttcttattgtgcgtaaaccttgcagaaaagtacgtcaggccctcttcggctgtacacgcaggatttgaaaagttttgtatcccgataagcgagcgctgaaaaaaggaatttagccaggcagagggagtctttatgagtaatggcctgcatgctcgaccctgccaagcaacgcaaaatgcaggatgcatgatggccattcatgcaaattgcacgaattcgaaaatttagaatttttataaactattgatttataacgatatttatttaaatcactagctggcacaatcactgcacctatctctccatgcttgccaacttgagccaacggagctgatagacatgagcctgatccaagataaattcgcttcagtattctccaactacgatgtcaccacccagcctcgtccagatggcggcatcctgctgaccctgcgcaacagcgagggtaaacaggtcaagcgttcgatctcataccagcaattgcacactgccgaccagctgacatgggttatcagcgccattcgccgcgacctggcagaacaggccagcgagctgccgcagatttcgatgctgcaaagccagaaccgctttgccttgccgacctaccactcggcttaagctccagatacccaaaagggccgcgacgcctctagcgtcgcggccctttttcatgggttcaacacagcccttgtcggctggcttcgttgacggcctgtacccgattggtcacttccagcttgcagtagatattgcgcaggtggaacttcacggttgcttcggacgtggcgcgtatctggctgatctcccagacggtcttgccttccgaagcccagcgcaggatttccaactccgccggggtcagggccttgcccgctaggttcagacgtcgcctgattgcattgggcagcgaatacggcggtagatacgattccttggggccgctcattagatcctctcctttttctggctcatgccgcaccaccttcttcggattcctcctattgacaggtgacataaacattgatgccgcagagggttacataacgaatggtattaaggcgcaggcccgcgcataaacatccgggccttacagaagtttaagtttcttcccacagcaacttccaaccttcaggggttgtagtttttgataggtggggattagtcgtcgaggccggggaaacgactggcaatatcgtcctcggtgaactccggtatacattcttcagccgtactgcacaggcgcagcgtgacgaagtgcgggttctcacccatatcaatccagtgcgccataccggccgggatcaccagcaggtcgtttttctcacagcgcacggcgtatacgtaatcgcctatgtgcagggaaaacagcccctggccagcaatgatgaaccgcgcggtatcttcgctgtagcggcgctcagcaagaaaacccgcacgcacttcggccttctggagatgatcctccgtcaccttgagcacccgcgcatctgcgtagcccaaggcctgaatctgcgccttgtacgccgcaatcaattgcgcatctgtggcccccttctcgatggggacaggctgccaacgctcaaaacgcacgccgtgttcggccagggtcgcagcaatatcctcgtagtgggtgaggaccttgttcggggtgtccggtgaagcaacggagtagacggcgacatagctcattgaagggttccttggttctgctcgtgcaatcgaagaccgatgataagggcggcggccagggccgcgacgctcgcgatgctgaacgtcagggtcggccccaacaggttccagctgtagccggcatacagcgcacccagcgcaccgccggtaccggccagggcggcgtagagcgcctggccctggccttgttgccggtcaccaaaactgcgttgcacaaaggcaatcgaggccgcatgaaagctgccgaacgtggcggcgtgcatcacctgcgccagcaacagcacccagaaatactcggcaaacgaccctagcagcaaccagcgcagcgccgccaacaggaaactcgccagcagtacccgacgtaccgaaaagcgcgtgaggatgcggctcatgccgaggaacatcaacacttccgccacgacccccagggcccacagcatgccgatcacaccgcggctgtaacccaggtgttccaggtgcagcgtcagaaaggtgtaatacggaccgtggctcagttgcatcaatgccacgcaggcataaaacgccagcacgccggggctgcgcaattgcttgaggaagccgtcgcccaccagacgattgccgtgggtggtgggctgcgcattcggcacccacaggctggcgccgataatgcccgccatgatcaccacgaccaccaccgggtagatgtccaggctcagccagtcgaacaggcggcccatgatcaccacggtgaggataaacccgatggaaccccacaggcggatctggctgtagcgcgccgtctgcttttgcaggtgcgcaagggtgatcacttcaaactgcggcagtaccgcgtgccagaagaacgcatgcagcgccatgaccagggccagccaggcgtaggtgtggctgacgaagatcagcgaaaaactcgccagggtgcataccgcaccaaaacgcacgatggccaggcgccggccggtgtaatcgcccagccagccccacaggttgggcgccacgcagcgcatcagcatgggaatggccaccagctcgccgatgcgcgcgctggagaaccccaggtgatcgaagtacagcgccaggaacggcgcagtcgcccccaggagggcgaagtagaacaggtagaagctggagaggcgccagtatgggagagatgaggtcatgctagatggggctgcttcgcagcccagcgcgagcaagctcgctcaccacagtcacagctggcccagcaccggcgtactcacgcgcacatcggcgttttgcccgcgattgcgcaacaggtggtccatcaacacgatggccatcatcgcttcggcgatcggcgtggcgcggatgccgacgcacgggtcgtggcggcctttggtgatcacatccaccgggttgccgtgcacatcgatggaacggcccggcgtggtgatgctcgacgtggccttgagcgccaggtgcgccacgatcggctggcccgaggaaataccgccgaggatgccgcccgcgttgttgctgaggaaaccttgcggggtcagttcgtcgcggtgctcggtgccacgctgggacacacaggcaaaaccggcgccgatttcaacgcctttgaccgcgttgatgctcatcagcgcatgggcgagttccgcatccaggcggtcgaagatcggttcgcccaggcccggcttcacgccctcggccaccacggtgatcctggcgccgacggaatcctggtcgcggcgcaactggtccatataggcttccagttccggcaccttgtccgggtccgggctgaagaaggcgttgccctcgacgctgtcccaggtcttgaacgggatttcaatcgggcccagttggctcatgtagccacggatcacgatgccctgggtggccaggtatttcttggcgatggcaccggcggccacacgcatggcggtttcgcgggcagaactgcggccgccgccacggtagtcgcgctcgccgtatttgtggtggtaggtgtagtcggcgtgagccgggcggaacaggtccttgatcgccgagtagtccttggacttctggtcggtgttgcggatcagcaggccgatggagcagccggtggtgcggccttcgaacaccccggagaggatctcgacttcgtcgggctcctggcgctgggtggtgtggcggctggtgccgggcttgcggcggtcgaggtcacgctgcaggtcttccagggacagctcgaggcctggcgggcagccgtcgacaatggcgaccaacgccgggccatggctttcgcccgcggtggtgacagtgaacagcttgccgaaggtattgccggacatgcagggcgctccgtgaaatcagttgaatcaagtcaaccgtaataacttaaggcggccagtatacgcaggctaaccgagtagttcatcctcgaaaccttaccggtagaccttggtccaaccggcaccttcctcatgatggcgcgatgatgctgcgagttctgcttttgaccctcaccctgttttccagtgttggcttcgccgcctcccctgtcgtgctgcaaaggcccatcagcctggacaccggcagtggcgagctgtttggctcactcttgttgcccaaatccgataagccagtcccggttgtactgatcatccctggctccggccctaccgaccgcaacggcaacagtgccgacggcgcgcgcaacgacagtctcaagcgcctggcctgggtgctggcgcggcacaacattgccagcgtgcgctacgacaagcgcggcgtcgcggccagcctggcggccacgccggatgagcgcaacctgaccctggatgcctacgtggccgatgccgtggcctggggcaagctgctcaaggccgacacacgcctgggcccgttgattgtgctgggtcacagcgaaggtgccttggtcgcggctctcgccgcgccgcaactggacccggccggcgtcatttcgttgtccggcagcgcacgcccggtggaccaggtgatccgccagcagttggccgatcacctgccccctgccctgttgctgcgcagcaacgagatcctcgatcacctcaaggccggccaggtggatgctgatgtacccggcccgctggaaggcattttccgccccagtgtgcagccgtacctgatcagcctgttccgtgccgacccttcggccgcgttcgcccagttgcgcatgcccgcgctgatcatccagggcaccaacgatatccaggtgggtgtgggcgacgcccagcaattgaaaaaggccaagcccgacgcacagctggcggtgatcgaaggcatgaaccacgtgatgcgcatcgtgcccaacgacgtgaagcagcaattggcctcgtacaacgatccgcaactgccccttgccgccgagctgggcagccgcgtcgtgcgctttatcgacggacttcaaccccgttaagcgacaatttgtctccagtcctgggaaaaacggccgataagccctgggtcgacagcaaaaagactgtcggctcgctgggcttggacaggatcgcgccgcatgacaaccactgaagcaacaccggaatccaccgccgataccccggctgaaaaaaccgaggccgtcgacgcggcgcccttgccgtgggcggaggtccaggccgagcatttcaagatgctgcgcctggcgcccctggccaccgaccgcgccaccggcgtgcgaccgttgcgcttcgtgcagtttggctacgccgagcgcaatgacaaacaccacagcctgctgcgcatggtgatccagctgccagggcagcgcgtgcgccgtgagcagaaccacctggacatctgggtcgaccacgacaagcaccgcgtgcacttcggcccgggcaacagcctggaaatcgaaccggccaaccggggtatcggtcgcttcctggtggcccagggcgccgcgtgggcgaagaagaagtggtcacactaccgcgtcgacggcgtcgacctggccaacaaagatgcgttgaacgaggccacccgcctacgccgtgatcacttcctgcgcatccagggctttgatgtggcctacgccgatgtgcagcacctcaaaggtaatgtgcagccgggcaaggtcggcgatgtgctggacagttggaacaccgagaaggtgcagttcgtggagattctcgaagccgcgcagatgctgcaacaggccgagcagaacctggcggagcaggaagtgaaactgcgcaaggaagaggaaaaggtcaccaagttcaagcgtgaggacagcgggttgcgctttaccatcacctgcctggtggcgtttacagtgtttcaggcggggttgttgatctggattgccacccaccgctgaaatgagtctatgccttgaaataaggtctgaatgtgggagggggcttgcccccgatagctgagtgtcagtatttggagtagctgactgatccaccgccatcgggggcaagccccctcccacattggccctattcgttcagtaaggtgggttaaacgcgggcggcaaacaccgcctgatgttgacggcattgctcagccgtcaacatgaacaccccatgcccaccgcgctggaagtccagccaggcgaagtccacttccgggtacaacgcctcgacgtgcacctggctgttgcccacttccacgatcagcaagcccttctcggtcaagtggtctgccgcttcggccagcatgcgccgtaccaggttcaagccatcgtcaccacaggccaggcccagcgccggttcgtgttggtactcatccggcatgtcggcgaaatcttcggcatccacatacggcgggttcgacacgatcaggtcaaaacgctggcccggcaggccgtcgaaaccgtcaccctgcacggtgtagacgcgctcatcgacgccatggcgctcgatattctggttggccacttccaaggcttcaaaggacaggtcgcccagcaccacttcggcgtcctgaaactcgtaggcgcaggcaataccgatgcagccggagccggtgcacaggtcgaggatgcgggcggggggctgggccagccagggttcgaagcggttttcgatcagctcgccaatcggcgaacgcgggatcagcacgcgctcgtcgacaatgaacgacatgccgcagaaccacgcctcattcaataggtacgcggtgggtacgcgctcatggatgcgccgatgcagcaaacgttgcacatgggagacttcctcttcctccagattgcagtctagataactgtcggcaatttcccatggcaggttcaaggcgccgagcactaattggcgggcttcgtcccaggcattgtcggtgccatgcccgaaaaacaggtcttccccatggaaacggctgacagcccaacgaatatggtcgcgcaacgtgcgcaggcgggatgtgatcacggggacaagctcctggaaaaaacgactggcgattctaacagccttcacctgtaccgacgatgtacgaaaacctgcgcccatccgtcggatttcatccaaattgccatcattgcgttaaacaggcccacctcttgacatggctgcacgtcaacaacggcgtaccttacgatggtagcgattcacagaaccgctcagccagtggacaatgtcgcaaaagcccccctcacaggagccccagaatgtccgttccaaagacgatgtttcaactcagcggtcgtggttacgcagcagcgaacctcagccatgcgaccctcgtgatcatcgacgcccagaaggaatacctcagcggcccgctcgccctctcgggcatggacgcggccgttggtaacatcaagcaactggtcgccgcagcgcgcaacgccgggcgcccgatcgtccatgtgcgtcacctgggcaccgttggcggcttgttcgaccctcaaggcgaacggggtgagttcatcccgggcctcgagcctgagggcgacgaaaccatcatcggcaaactgctgcccagcgcatttcacggcaccggcctggaaaaacacctgcaggacctcggttccctggatctgattgtctgcggtttcatgagccactccagcgtcagcaccaccgtgcgtgccgccaagaacctgggctttcgctgcaccctggtggaagacgcctgcgccacccgcgacctgccttacaaaggcggcatcctcagcgccgagcacgtacagcagaccgaaatggccatcatggccgacaacttcgccaccctggcgttgaccaaagatctgatctgatcgaccttctgatgagcggtgcggcaatttttattgccccgctcatccgcaaagccttttcatttggcgcatttacccctcgtcccggaacaacctgtgtattgtccggtcgaagggccgataccctggaggaaaggtcggaatgaagatatccgatggttttgatgctcgtcgcttgcgccccaagggcccgagcaactggcgtctgcgcctggtggccggcatcgccgcgctgctggcgatcgtaggtctgctgttggccggcgctggtggtgccggtctgtctggtcactcgccggcccttggcgagctgaatgccagccctggtggctcggctatcctgctggggatcgggctgctggtactgtggctgggcgtatggttgtggcggcgcagccgtcggaaaatgcgccagccgttgtcgcttaatatcgcttcgcacctgatgaaaaaacacgactgatggcgcttggatagcgtttcctgcgccccggccgccgcgatttaggtaaactgcccgcccttcgcggaggctgacatgcaagacgacgatttttccctgttcaaaaacgagctgcgcggcgtcaagccgatcaagcacgaccgcgccgacaccggcaaacccaaggccgaccgcgcgcagatcgccaagctgcgccaggccgcgaccgtgcgaaccgatgccaccaccgtggacggcctgtcggaccagttcgtgatcgacgtcggccccgaagacgagctgatgtgggcccgcgacggtgtgcaggaaagccagatgcgcaagctcaagatcggccagatcccgttcgaaggcagcctcgacctgcacggcatgaccgtggaaaaagcccgggagaccctgtgggcctttctcgccgaagccaccaagttcgaaatccgctgcgtgcgcgtcacccatggcaaggccgtgcggctggacggcaagcggccgatgatcaagagccacgtcaacacctggctgcgccagcatgcccaggtactcggctttacctcgtgccaggctcgtcacggcggcgcgggggcggtgtatgtgatgctcaagcggaccatgatggaagggcgcgacgaataacaagtgccatcgtcaggcttgcagcgatgtgcccgccaccgtaaccttgcgctttgcgaaaatcccacaggtagtttcatgtccctggaacagaattacaccgcgatcctcggccaactcggcgaggacgtttcccgcgagggcctgctcgacacgccaaagcgtgccgccaaggcgatgcagtacctctgccgcggctatgagcagacactggaagaagtcaccaacggtgccttgttcagctccgacaacagcgaaatggtgctggtcaaggacatcgagttgtactcgctgtgcgaacaccacctgctgccgttcatcggcaaggcccatgtcgcgtatatcccgagcggcaaagtgctgggcctgtccaaggtcgcgcggattgtcgacatgtatgcgcgccgcctgcagatccaggagaacctcagccgccagatcgccgatgcggtgatgcaagtcaccggcgccctgggcgtggccgtggtgatcgaggccaagcacatgtgcatgatgatgcgtggcgtggagaaacagaattcttcgatgatcacttcggtgatgctgggtgagttccgcgaaaacgcggcgacccgcagcgaattcctcagcctgatcaagtaacaggctgcgtaggaaaagaccggcgctcatcgccggttttttttcgcccgcagaattcaggtaagctgccgcccctcagttatgggcaagaggtttacaccatgttggtcaaagcacttcgagtcggcctcggccagatcatcatcgcgggcgacttcctgacccgtccccgcaaaaaacagcgccccgccgaacagcaggcgcaggtgaatgcagcggccaaggaactgaccctgtatcagttccacgcctgcccgttctgcgtgaagacccgtcgcaccctgcgccgcctgaatgtgccggtggcgttgaaggacgcgaagaacaacgcgcaggaccgccagaccctgctggagcaaggcggcaagatcaaagtgccgtgcctgcgtattgaagagaatggccagaccacctggatgtatgactccaaggtgatcatcgactacctcgacaagcgtttcgctgcggtctgacagacactggataaccaatgtgggagtgggcttgcccactcccacatttagttcagtattggcaaatcaatgtccagcagcgcggagcccaggcacttgccatgggcatccagcgccagcgagcgggtgacaccaccacgcagaatgcccggcagaacgaagttcagtgcctgcacattcgccagctcatagcgccgcaccggtgcggcgcctggctccagttggtcgacaaagaacgcggccacgcgctcaaccgtcagctgtgcgcagagcaatgggtaatcctcggcacgataggcaatgatcgaaatgttcgacgtgtcgcccttatccccggtacgggaatgggccagtgtgtgcagcttcatgcttcgatcctcggtttgaccgcatcacgcggcagcagcaacgacgccaccgccaccacctgccgcacgctcttgctcgcgccgccgccaccagacgggccgttggtgtaaagggtttccacttcgttgccgacgcgcaccgcttcgctgcgctcttcacaacgagccgccacgcgcaggcgcacttcccagggctccaccgtgctgcgcgggccgtgcagcgagtccatgccgatcaattcggcacgcacgtcctgcatcttcacccccatcaactcaaggcgcttgagcacgacatcccgcgccagctgtgcccgagcgacagcaccagggccaccgtaggacatctgcccttcaccgatccatccgtccagatagccaacactcaccttcaactgtgcgggacgcgagcgccccccagcaccttgggcacgaacgcgatccgcgccctcctcgacaaagcccacctgggaaaagtcggctgtaacatccggcgtcagataggccgcagggtcatgcacttcgtagatcagttgctcggtgcaggtggcacagctgacccgaccaccggagccggtgaccttggtgatcacggcttcaccgtcggcatcaatctcggccagcgggaaacccaggcgcgccaggtcatccacatccttgaaacccggatcggcaaaatacccaccgctgacttgcccggcacattcgagcagatgccccaccaaggtgccgcgccccaggcgcagccaatcgtccgctgcccagccgaactcaaacatctgcggtgccaggaacagcgaggggtcggccacgcgcccggtgatcaccacgtccgcatcggcgtgcaatgcctgcagaatgccgtcgacgcccaggtaggcattcgctgagatcaaccgttcacccaaagagccgacggtctggccgttatccagcaaaaactcgggctgcaacatcgtcaacacgtcgtcgcccaccacagcgagtaccttgagatccaggcccaactcaacagcaattcgccgcacttcggccgccgccgagactggattggccgcgcccatattggtgatcacccgcaggcgacggcgcccggtctgcacacccacaaacggcagcacccggcgcatgcgctcactcaacagcggatcgtaaccgccttgcggatcgctgatacgcgcctgttgcgccaaagcgatggtgcgttcagccaggcattcgaataccaggtaatccaggtcgccgtgttcggccaactcgaccgcaggttcgatacggtcgccggaatagccggcaccggaaccgatgcgcaaggttttcatctcaaatcactcccaggagcaacgcggtcagggtcatcaacaccgacgcggcaaacagaaacggaatggtgaagcgctggtgatcggccagttcgatcttgcacaggcccaccaacaggaaggtcgcaggggtcagtgggctgaccgggaaaccggtggtgtgcacccccagcaacgaggcctgggccacttgcagcgggtcgacgcccagggccttgccgacttcagcgatcaccggcatcacgccgaaatagtaggaatcggggtcgaacagcatgcttaacggcatggaaataaaacccaccaccgccggaatcaacttgccgtgacccgccggaatctgcgccaccgccacttcggcgatggccttgagcatgccggtgccttgcatgatcccggtgaacaccccggcggccaacaggatactggccatggtcagggcggtcttggcatgggcatcgatgcgggcacgctgggcatccacgttcgggtagttgatgcacaacgccactacggtgccgagcatgaacatcaccaccgggtcgacccagccggcaatcatcaccaccatcaccagcacggtgaggatcaggttgacccagaacaggcgcgggcgacgcagcttgatgtcgtcgtcgctgagcacccgttgcggcaccgcatccaccgtggagccggcgccgagacccaggcgtttttcttcgcgacggcccagccaccaggcacaggcaaacacgaagatcaggccgacgatctgcaccgggatcagcggctggaacaggtccgccaccggcacgtgcagggccgctgacgagcgcagcaccggcccggtccacggcaggaagttgacaccggcggccatcgcacagacgcaggcgaggatgcgtttatcgatgcccagccgcgtatacagcggcaacatcgccggcaccgtcaccaggaacgtcaccgcgccggagccgtccaggtgcaccaacagcgcaagggtcgcggtgcctacaacaatgcgtgtaggacgcgtccctaccgtgcgcaggatgcgatcaataatggggtcaagcatgccggcatcggtcatgatcccgaaaaacagaatcgcaaagacgaacatgccgaccacgggggcgacgttcttgatcccggtgatgatgaaggcgctggtttgcaggccgaacccgccgagcagtgcggcaatgatcggcaaggcgatcagggccaccagcggcgagagacgtttgctcatgacggcagcgagcaggcacaggatggtgatgacacccagggtagcgagcatgggttactccagagcggcctttttggccggttattgttttccctggagtattggaagcaggttagtctttgtaaattggaatattcacccgctagtgttcggaaaaacaaaatgaagaacagtatccaacacattcaggcgtttctggcggtggcacgtactggcagcttcaccaaggcggccaatgagctgcatctgtcgccttctgcgctgacggtgcaggtgcaacaactggaagactggctcggcgtcgccttgctcgaccgcagcccgcgccacgtcagcgtcaccgtcgccggccaggaggcccgcgggccgatggaaaaactgttgctggacctggacaacatcgtcagcgggtcccgcgacctggcggcgttgcgccgaggcgtggtgaccatcgccgccctgccctcggtctgtgccggcagcctgccgccggtgctgcgcctgtttcgcgagcgttttgcaggaatcgaagtgcgcctgcatgacctggtcgcccatcgcattcatgcccaggtgcgttccggtgaggtggatttcggcattggcgtgcgcgcacggctcagccatgggctggaattcgtgccggtgctgaacgatcgcctgtgtgcgttcgtaccggtggatcaccccctcacccgccatcgcaaactgaccctggaacaactggcggaccagccgatcatcctcactggccgcgacagcagcgtgcgtgagcaagtggatgcgcttttcgatgagacacgcctgacgatgaacgcgggcatggaagccaactacatgtcgacggtattggcgctggtgcgccaggggctggggatcagtgtgctgccggaatcggcggcggacagcctggcggggttgaaacgcatccccatcgatcatcccggggtgaaccgcgagatcgggttgatcagtcgcagcgggatgggcctaagccctgctgcacagcgttgtttcgacttgctgaacgaacaactgaatgtgggaggggcttgcccccgatagcagagtgtcaatcacacataagttgactgatacaccgcaatcgggggcaagccccctcccacacgtttaaccgagcataggcacatgcttgggatggctggccacacgctgcaaccacgcctgcaccgccggataagcctccagctcaaaaccaccctcattcgccacatgggtataggcatacaaggccacatccgcgatggagaactgctcgcccaccaggtacggcgtcagttgcagttggcgttccatgaccttgagcgccttgtaaccgcctttgtgcagcttcttgtattcctccaggcggtcttcgggcaggcccaggtaaaactggataaaccgcgccaccgcaatgtacggctcatggctgtactgctcgaagaactgccactgcaacacctgggtgcgcagacgcggttcgctgggcaggaactcgctgccatcggcgaggaagttgaggatcgcgttggattcccacaggcaggtgccgtcttccagctccagcacggggatcttgccgttggggttcttcgccaggaactcggcggtctgggtgtcacccttgaggatgtccacatcgatccattggtagggaatgcccagcaggctgagcatcaatttgaccttgtagcagttgcccgacttgtaatcgccataaaccttgtacatggggctccccttatgccgcttgcgcgtgctgtgcttgacggaccaccgcggccaggcgcttgagaccttcatccaaacgggccgggtcgatatggctgaaattgagccgcaacgagccaagatgttggtccggctcggaaaagaacggttcaccgggcatgaacgcaacgttctggtcgagcgcttgagccaacaaggtgcgggtgtcgagcggctgtttcaaggtcagccagaagaataatccgccctggggcacctgccagtcggccagctcggcgaattgacgctccagcgccgactggaaggcatcgcggcgctcgcgataaaagctgcgcagttgcgccaggtgctgctggtatttttccgtgccgatccactgcatcgcctgccattggccgacgcggttggtgtgcaggtccgccgattgcttgagcttgagcaggtgcgggaacaggtccgggctggcgatcagatagcccacgcgcaggcccggcaacagggtcttggacacggtgccggtgtagatccagctggcttttttcaggcgcccgacgatgggtttggcgctgccgccgtcgaaggtcagttcgcggtagggttcgtcttcgatcagggtcacgccgaattcgtcgagcaaggcggcgacggcttcgcgcttggcctcgctgtagcgcacggccgaggggttctggaacgttgggatcaagtagatgaaggccgggcgatggcgctcaagattggcacgcaacgcgttcaggtccggaccatcggcttccagttgcacggtgaggcaatcggcgccgaacagttggaagatctgcaacgcggccaggtaggtaggcccttccaacaggatctgcgtgcccttgtcgatgtacagcttggccgccaggtccagggtttgttgggaaccgctgaccaccaacacctggctggcctggcacggtacacccagggcacgcgcctcggcggcgagcagttcgcgcagctgcggttcgccttcgctcatgccgtattggccgatgttcagcggcatgtcgtcccagttcaaggcaggcaacatggcttcggccggcaggcctccggcgaacgacatcacttccggacgctgggccgccgcgaggatttcacggatcagggagcttttgaggcgcgtaacacgttcagagaaggccatggggtcaccggtagcgaagactgtgggaaatacgtcaaactggttgaccgaaattacgacgactcgcacggatacgtcaatatgcttgaccttaaaaaccccaccgcccagcaggccgccatggaagcgttcttcttcggctaccaagcgtttaccgccaaggccgacgaaatgctcgagcgccgtgggctgagccgggtgcaccagcgcattgtgtttttcatcgcgcgctacccggcgttgagcgtgaaggaactgctggagttgctcggtgtgagcaagcaggcattgaacatcccgctgcggcaattgcaggagatgcacctggtcaacagcgtcgcgtccgagacagacaagcgcaaacgcctgctggagttgaccgaagaaggcctgcgtttcgaacagtcactgcgccgcgaacaggtgaaattgctgcaacgtgccttcagtgacgcgggcgaagacgcggtagttggatggctggcggtgaatcaggcgctcgccaatcaaccctgatgcggtggtgacgctcctggggccgctacgcgccccaacgcggggcaagcccactcaccacgcaatcgtatggttgcctttcatctatttcgtgcagcaaatagaaaacattatttgctttatttgtatacaaaagcataattcgcttcgtgcgagttcctgacctattggtcaacaaacccgccagtacctctcagcgcttcggcgctgaccataacaataaaatgcttgaggagtactcgctgtggatagccgcaaatccgaagcctcgacgctggaccttgccccctcaccgaacggctggctggaacgcctgttcaaactgcgcttgcatggcaccacagtgaagaccgagctgatcgccggcctcaccaccttcatcaccatggcctacatcatcttcgtcaaccccaacatcatggccgatgcgggcatcgatcacggtgcggcgttcgtcgccacctgcatcgccgccgcactcggttgcctgttgatgggcctgtacgccaactggccggtgggcctggcgccaggcatgggtttgaatgcatttttcacctacaccgtggtcggcaccatgggctacacctggcagaccgcgctcggcgccgtgtttatctccggcgtgctgttcatgtttctgactctgtcgcgggtacgtgaatggctgctcaacagcatccccgtgagcctgcgccacgccatgggggccggcgtcggcctgttcctcggggtgatcggcctgaagaccgccggcatcatcgtcgaaagcccggcgaccttgatcaagctcggttcgctgcatgagccggcgccattgctggcggcggtgtgcttcctgctgatcgccatcctcagctaccaccgtgtgtttggtgcgatcctgatcagcatcatcgccgtgacactggccggctggggcctggggctggtgcactacaacggttttatctccacaccgccgagcctggcgccgacctggatggcgatggatgtggcaggtgtattcaatatcagcatgatcagcgtggtatttgcttttctttttgtacacatgttcgacaccgcaggtacactgatgggcgtcgcgcaacgagccgggctagtcaatgccgatggcaagatcgacaacctgtcccgcgcattgaaggccgacagtgcctccagcgtgttcggtgccatggtcggcgtgccgccggtgaccagctacgtggaaagtgctgcgggcgtagccgcaggtggccgtaccgggttgaccgccgtgaccgtcggcgtgctgtttgtggccgcgatgttttttgcaccgctggccgggatgattccagcctatgccaccgcgggtgcgctgatttacgtggcaatgctgatgatggcgagcatggcccatatcaattgggatgaagccaccgacagcatcccggcgattgtcaccgcgatcatgatgccgctgacattctcggtcgccgatgggattgccctggggtttatcacctacgtggcgctcaaggccggtacgggcaagtaccgcgagatttccgtcagcctgtgggtgctgtgcgcgattttcatcgcgaaattcatatttctataagaggtgttaggcatgagtctggaaacctggttgttgttcagtggcgcggcattggtggtgatcctgatccccgggccgctgtcgttgttgatgatcagcaacagcctcaactatggcttgcgccgctcctaccccgcatttctcggtggcgtaagcgcctcgatctgcctgctcagcgcttcggcgctcggcctgggtgccctgctgctggcctcggaacacctattcagcgcgctgaagatcgtcggcgcgttgtacctgttttacctcgcctggcagagttggcagcagtcgcgccagccaagccagggcgccgacgttccacaggccgcgccgaccccacgctttcgcgccttgttcgggcgggcgtttgtgctgggcgccagcaaccccaaggacatcctgttctttgccgcgttcctgccgcagtttctcaacagccagcagccgttcctggcgcagttgctgatcatgatcgccacctggaccgtgctcgacctgctgtgcaagctggcctacggcttgagtgcccacggcgctgcgcgctacctgcgcagtggcaagggccagggctggttcaaccggatcagcgccgggctgttcggtggcgcaggcgcgctgtcgttgctcaagagctgaccccgccgaacttgacgaaaaacaccgtcgggttggaacgcgatgtccactggataccggcaatgatcttgaccaggcggttctgattcaatgcccgactgatctcgggcatatgctccgaataggtacgcgccacactgcgccgcctgaaccattcgtcagtcaattgcacgctggtggcggaccgcaggttaacggtgctgttcttcacccagcgcgtgagcacgtagtacctggcgttggatttggggtgcgtgcagaagtaatccaccgagtactgcccgcccatgcgtttttcgatcgagtggatgacaaacccttgttgttccagcatccgggcaatcaccgcctgcaccacctgggccctggcactggcgttttcgcgggtgctcacgcgcaaggagggatcaaggggcgctggcagggtgaagtccatgcgcgtaaaccccggtgaacggccttcatagccaatgtagaaagccaggcgccgtcggctgtaggtcggacgcaacattttcagcaggtcatcggtgtggcccacggcaccgggggcgagccagtcatccagggtggcgcggagggtcaacagatggctggcggtcacctcacggccggtgtcggccaactcaatcaagcgctcacaggcggagcgccggctgagttccctcatgcggggaaacactcggcccatggtgttttccagcggctccaggaacagcaccggccgcgccttccagaggccatcggcgcccagcgtcgcaggaatcggctgctcactgaagccggcgcccaaccagaagtgaatgtcggtggccgcttgcggagccagcgcccgattacgggtgagaaagataatgctctggaacgacgaattggtcccctcgggcagcaaccggaacaaacgcccgtcttggcgcagcacatcgaaggcccgctccccctccccgcccgacacgcggaagatcccgcgctcgggcaacaggtctgtcagcacccatcgcgaatcgaacgcccacccctgccccgcaccgggcagatgggcggcgcggcccacgtgttcctgcagcatcgcatgagaaggcggcgaccactcctgggcgctgggggttgtagcccacggccgccacatctcggtactgggtcccggctgcggctggggtggcggggcatcggcgccaagcagccattccccgggttcctcgatgtgcagaatcagctcgttttgcacatcgtcctgcgggtgcttgagacgcagcacctgttcatcctggcgtcgatagaccgggtattgatgggtatcgtcgagcacaaattgctcgccacccttgacgtaagtgccccgattacccggcccctgcaactcgatggctgcgcttggcggcaggtccttgcgaaaccgttccagcgccttggccggcagggtcgtcgacggtttgagcgcagacagcccgccgccgaccaacccatgacgacggtgcagccggcccagggcaccgcgcatcgacgcgcgcgcggcggccacgcctgtcacccgcgcaccttttggcccgggaatgaacgcggtcagcacatccacaaagcccagcagcgtgacaaacaccaagtcaacggcgtcactgggatggcggctgtgatgaaagcgcctggccgccaacagaatctcgtaaaggctgacccccaggccgatcaccggtacgaacgacagcaacccacgcagcgtagccgcgtgttgctcgcccaagcgatcttgccggtaggcctccaatgttctggccgatacggcgcgcccctgtgcgcggtgctggatttcgagcatccgcgcgtgcgccaacagtgccaacgtatgactggcgggggttgcactgaagtcgagccaggcgttcggggcggcggcgatctgctcgttgatctgcgcctggatatcctccacggccaccgacggcacgcggtgcttgaccttgaacgagcgtatgaaccgggcgatggcctcgaccgtttccagcacatagaacccacgcaccggagcaaacaccagtctggttccaccggtagccaccatcgcccccccgctgccgacgacggggtaactggcgatggcctgcgtctcccaccccggtgccacctgatgggccagggctttcacattggccggggtcgcccaagcctggttcaaagcggcgacagcctgctcccggctcgtgtactcggcgatggccgggccatccactgcggcaggccagtacaccagccacaaccctgtggcttcgtcgtgggtcaccagcaccccggcgatatgccggtcgtgttccagggtatgcccgcacaggcgcacgaagtgcaatcgcaggcgatggccgttgccgttcagatcggccaccgcctgcgccgccatcagggtgttgaacacactctgggccttggcactcaggccctgccttgccgccgaaaacccatgcatacgcgcctgctggcgcagtacccggtcaatcagtccaccaggcaacgttgggggcgcgcaagcgggcggataaaacacttgctggatcaacgtgtcatagcgcccgccgatatccagggctgccagggtcttgatcaagtaacggctattcaagcgctgctgccactgcggcgccaggtagcgcgcgcggttcaagcgccactcggtccagggcgcctgggcatccagattgtgcagggccaactgcaacaggctgaatgtagtgcgttgcggactgacgactttcttgatatcccgctcgcccaccccgcactggctggtccacccgcagaagtaggcgctgacgtcatcgggcatatcgagcaagggctgatcgatatccacctccgggtacaacccatccagcttcaattgagcgatcagcagcttacgtgcgaacgcctccaactccggcaattcacgccagagcttggcttcgaatgcctgggcactgctcaagtaatgcagctgtaatcgtcggtaggcattgcgctgatcggcctgcgcctggcccagccatgccggcagtttattcgcctgggcggcggcgaaccgcagcagctccaggttggccatggcctcggtcaaggcgtcatgcgccggcacctgtaggtgctcgcgcatctcggcggccaacagcatccggatcagcgcccggtcgcggacttcactgaaaagccgcaagccctggtccagtccctggtcgagcctggcgtagtggttgatcagttcagtgagcccatggtgcagcacatgttcctcaagcacttcgtacgtcaccgtgatgtcagacgcagtcttcagcgcctggcgccgatcacgccccacgcactgccagaggggcgagccgtcgcgactgcacaggctaacccgcaggcgctcggatagcgtctccaggtcgtcgaatgcagccagcccgccgaagcgcccggccacacacagcagcactggctgcgtccgcaccggggtggcgtgggcctgtttagtcgtcactacgaacgcccccagcatcccctcgccgcccaacagcacccgcagcacgcaggtatcgctgccgttgcgatcgctggcatggggcttgttcaacacttcgaccaggcgctgcaagggcgcctcggccatcagtttcaaatgctgcagccgttgcacctcctgcaacaacgcctcgcgctgggcgatcaacaacaaggtggtacggttgcgcgtgtcgtctgggtgttccagccagaatgccgggctcagcaggcgctcatctgccccgagtgacagggcctgcaccgcatcagtctgtgcttgccattgcccattgagcgtgaccaatgcgtcataggccgtgctctcccggctcgggtcctgtgggtcgagcagcgtcatgaggcgcttttcgtagcgctccacctgctgttcgcggctgcgcaaggccagtccggacggcagctggccgaggatgatttctgccgcacgccgcgttgcatcccaacccaacaaggtccccagggaagcgcccaggtgctccgcgatcgccagtcggtcccggcctttttcgataaaccgcaggaagcgcgccgtgtcacgccccagtgaagccggcgccgctaacgtcgcgtgattgatcgacaacgcgcacgccagctcgttgtcccattgcgcatcaagcacggcgattgcactgtgctgcaaggcatcgccgctcagcgcagcgccacgcgccaactgcgtctcgccgcgacagacttcgtggcgacggcgtagcggcaagcactgccacaagacactgaacaacgcgccgttcaacaggctcgccaaaccgcgttgcacctgttcccaagcactgaactcatagaatgcgcgggccatccctggcagatagatcacgtggggcgcctgctgcgccgcgccctcacggtacaagtgcagggcgccgggaatggccagcgccgtctgaaacgtgccgggccacagtactgtgccgacgcgcacgccagcccaatcgccgccagcgcgctggcgtgcctcttcggaaggcgcatccgccaactgctgcaccaacgcccaacccgcatccgacagttcatccaactggtgcgccaggaagcccgcgtcgatgaacaaacgcttgcgcaattgcacccaacgcgcctggcgcgtcaaccacgagccgtacgccaaatactgccagtattcacgtacctggttgtcgagccgagccatcaaccccagccccttgacccgctccagcgcctgccgggcggtaaaaggcagtttgcgcgcagggtcgtccttgaggctcagcgcggtatactggttaaggttgatcggcaaggacggatcgctgaacaacgccagcgcgcgctcggtcagactgtcgactttctgcgcgggacgtggcggcaggggctcggtgaacagcagggtgtccggatccaggccaaaggcttcctgcaacgcgaaacgaatcacccgcaacagccgtggcgccctgcctatcagacgcttgagcgcctttgaggattcgatacagcgcgtgttcacgaggtgccattggttgatcagccggctgggttgggcggatgcgttgaggcggcgcgtcagcaagcggcgaacggcttgatcacgggcctcactggcctgaatgggattgtcgagatcaaagggttcggcggtgacagtgtccggtgccgagactacggggttgaggggatcagagctcatgacggcgtcttcttgtacgaaagacgccgagcctaggcctcatccctctaaggtgtgcgccacataattgaacgggcgggcgggcaaatgccaggcaaaaaaaagcccgcagtgtgcgcgggcgaaaccaacgaagagctttgggggtgtgaagcgaggtgacgctcagctaccgcgataggtggagtagctgtagggcgaaatcagtagcgggacatggtagtgatcctgctcggcgctgatgccgaagcgcagcaccaccacatcaaggaaggccggctccggcagttgcacgccgcgggcgcgatagtaatcaccggcgctgaactgcaattggtacacgccgctgcggtagtcgtcaccttgcaacagcggtgcgtcgcagcggccgtcgctgttggtctgcgcggtggccaccagttccagctgcacgccttcgacgcggtacagctcaaccttgattgcgctgccggggcagccgtgtgcggcgtccaatacgtgtgtggtcaagcgtcccatggcgtctgcgcgcctcctgtggtcagtagaaaagtgatccgcactttttcagggcatcgaaaaagccggtgatgatcgattaagacactttttaaaaaaattgtacacaataaaaatcacaaactctcagatcagcctactgccattgctcaacagggcaatctgcgcgttatccttgcttttaaaagaccttttgtccattagctgaccaaccaggcaagtttcttgctacacctctggtctagcgctacgccgaaaaaatgcagaaatgtaggcttacaaagtgcgcgataagttgtatacaatcactcatcgctactacgacgaacaagaaggaagactgcagtgagcgctgactacccacgcgacctgatcggttacggcagtaaccctcctcacccccactggccgggcaaggcgcgcattgcgctgtctttcgtactcaattacgaagaaggcggcgagcgcaatatcctgcacggcgacaaagaatccgaagcgttcctttcggaaatggtctcggcccagccgctgcaaggcgcgcgcaacatgagcatggagtcgctgtacgaatacggcagccgtgccggcgtgtggcgcatcctcaagctgttcaaggaattcgacatcccgctgaccatcttcgccgtggccatggccgcacaacgccatccggatgtgatccgcgccatggtcgacgccggccatgagatctgcagccacggctaccgctggatcgactaccaatatatggacgaggcccaggagcgcgagcacatgctcgaagccatccgcatcctcaccgaacttaccggcgaacgccccctgggctggtacaccgggcgcaccggccccaacacccggcggctggtgatggaggaaggcggcttcctctatgactgcgacacctacgacgacgacttgccctactgggaacccaacaaccccaccggcaagccgcacctggtgatcccctacaccctggacaccaatgacatgcgcttcacccaggttcagggtttcaacaagggcgatgactttttcgagtacctcaaagacgccttcgacgtgctctacgccgaaggggccgaggcgccgaaaatgctttccatcggcctgcactgccgcctgatcggccgcccggcgcgcctggcgtcgctgaagcgctttatcgaatacgtcaaaggccatgagcaggtgtggttcactcgccgcgtcgacattgcccgccactggcaggaaacccacccctacacgggagcggccaaatgactgcgttccacagcctgaaaccctcaaccctgagccgcgatgcgtttgtcgccgccttcgccgatatctacgaacactcgccatgggtggccgaaaaggccttcgatctgggccaggacacttcgatcgaccagatcgaaaccctgcaccagcgcatgagcgacatcctgttgagcgctgatcatgcccgccaactggcgctgatcaacgctcacccggacctggccggcaaagccgccgtccagggccaactgacccaagccagcaccgatgaacaagctggcgcggggattcaccaatgcacggccgaagagttctcgcgcttcaccgagctgaacgacgcctacaaggccaagttcaagtttcccttcatcatggcggtaaaaggcagcaaccggcaccagatcctcgccgcgttcgaaacgcgcatccataactcggtggacaccgagttcaagtgcgcgctggacgagatcaacaagatcgcgttgttccgtttactgaccctctaaacgaccatccccagccactctattcaaggcagacaagaagaatgaaagcttacgccgtacctttcgagaagttcgtcaacctggccgacgcccgcctgggcaccaagatcatctctgttaccgatgactggttcgccgacgccaaccgcctgttccagccgaccccggccgtgtggaaggagggcgttttcgatgacaacggcaagtggatggacggctgggagtcgcgccgcaagcgcttcgaaggctacgacagcgcggtgatccgcctgggcgtgccgggctcgatcaaaggtgtggacatcgacacttcattcttcaccggcaacttcccgccatcggcttccctggaagcctgcttcctggcttcgggcgagccggatgacaacacccagtgggtcgaagtgctgtccgccgtcgagttgcaaggcaacagccaccactaccacgagatcaacaacgaccaggccttcagccacctgcgcttcaacatctacccggacggcggcgtggcgcgcctgcgcgtatacggcgtgccgttccgcgactggtcctcggtgggcgacaacgaacaggtcgacctggcggccgcactcaacggtggccgtgccctggcctgctccgatgaacacttcggccgcatgagcaacatcctcaacccaggccgtggcatcaacatgggcgacggctgggaaaccgcgcgtcgtcgcacgccaggcaatgactgggtaatcgtggcgctgggtcacccgggcgagatcgagaagatcatcgtcgacaccttgcacttcaagggcaactacccggacacctgctcgatccagggcgcgttcgtcaagggcggcaccgacagccagatcgaaacccaatcgctgttctggcgcgaactgctgccggcgcagaagctggaaatgcacgccgaacataccttcgccgagcagatcaaggcgctggggccgattacccacatccgcctgaacgtgttcccggatgggggtgtgagccgcctgcgtgtattgggcaaagtagccaagtaagcggtgaacccgatcgcaggcaagccagctcccacatttgactgtattcacaaatcaaaatgtgggagcgggcttgcccgcgatggcggcagaacaaaccacacaaaattcggataagaagacagccatgcgcacactagtgatcgaacccctgaccaaagaagccttcgcccctttcggagacgttatcgaaaccgatggcagcgatcacttcatgatcaacaacgggtcgaccatgcgctttcacaaactggcaacggtggaaaccgcaacgccggaggacaacgcgatcatcagcatcttccgcgccgatgcgcaggacatgccgctgaccgtgtgcatgctggaacgacacccgctgggcagccaggctttcattccgctgctcggcaacccctttctgatcgtggtcgcgccacttggcgatgcacctgtatcgggcttggtccgcgccttcgtcaccaacggcaggcagggcattaattaccatcgcggcgtctggcaccacccggtgctgacgatcgaaaagcgggatgacttcctggtggttgatcgcagtggcacaggcaataactgcgatgagcattttttcaaagaggatgagcggttgatcctcgccccccaccaataagagaaggtctgatcacccgacaacaagggtgacaggcgagaggtaaagactgtggaagcacatttgatggaatggctgaacctgagcgtgcgctgggttcacatgatcacgggcgtcgcgtggatcggcgcttctttctacttcgtctggctggaaaacaacctcaatcgcgtcaaccccaagagcggcctggccggtgacttgtgggcgatccacggtggcggtatctaccacctggaaaaatacaaactggccccgccgaccatgccggacaacctgcactggttcaaatgggaagcctatttcacctggatgtcgggcatcgcgctgctatgcgtggtgttctactggaacccgaccttgtacctgctggccccggacagcagcctcagtggtccggaaggcgtattgctgggcattggctcactgttcgccggctggttcatctactccttcctctgcgactcggccctgggcaagcgccctgccctgctcggtttcattctgttcgtgctgttgatcgccgccgcgtacgggttcagcaaagtgttcagtgggcggggtgcgtacctgcacgtgggtgcagtgatcggcaccatcatggtgggcaacgtgttccgcatcatcatgccggcgcaacgcgcgctggtggcggcgattgcggaaaaccgcacgccggaccctgcgctgccggccaaaggcctgctgcgttcgcgacacaacaactacttcaccttgccggtgctgttcatcatgatcagcaaccacttcccgagcacctacggcagccaatacaactggctgatcctggcgggcatcgcagtggcggcggtgttggtgcgtcactacttcaacacccggcataacagccagaagtatgcgtggacgttgccggtgggtgcgttggcgatgatcagcctggcctacgtgaccggccccaagccggtggccgaagtggccaaggcccccgcggccatcgagtaccaaccattgccggaaaccgcactgggcggtggcttgaaaccggcagcgcctgcagcacccgccgctgaaccggcgccggcccaggcgacgattgatttcgacaaggtccacggggtgatccaggaacgctgcgccgtgtgtcactcggccaagcctaccagcccgctgttcagcaccgcacccgctggcgtgatgttcgacaccccggcgcagatccagcaacaggcggcgcgcatccaggcgcaggccgtggcgagccagatcatgccgttgggcaacatcacccagatgacccaacaggagcgggatttgatcggcacctggatcaaccagggggcgcgtaccaactgacaggctggcgcagatccaaatgtgggagggggcttgcccccgatggcagtgtgtcattcaacgcatcagtgactgaaccactgcaatcgggggcaagccccctcccacaagggtctccagtgttttgaagattgagctctacccggcaattgaatgccaaacaacacaacaataaaaaagatccgaggtgttgcatgaccgagttagccgaaccgcagattcccgccgcacccgccctggtgcggctgcccctcttgcaactgattctggtaggcctgcaacacgtcttgctgatgtacggcggcgccgtcgccgtgcctttgatcattggccaggccgcaggcctcagccgtgaagaaatcgcctttctgatcaacgccgacctgttggtggccggcatcgccaccctggtgcagtcgttcggcatcggcccggtgggcatccgcatgccggtgatgatgggcgccagtttcgccgccgtcggcagcatggtcgccatggctggcatgcccggtatcggcttgcagggcatcttcggcgcgaccatcgctgccgggttcttcggcatgctgatcgcaccgttcatgtccaaggtcgtacgtttttttccgccgttggtgaccggcacagtgatcactgcgattggcttgtcgctgtttcccgtggcagtgaactgggcaggtggtggcagtgccgccgcgactttcggctcaccggtctacctggcgattgccgcgctggtactggccaccatcctgctgatcaaccgcttcatgcgtggcttctgggtgaacatctcggtgctgatcggcatgggcctgggctacgccttgtgcggtgccatcggcatggtcgacctcagcggcctgtctcaggcgccgtgggtgcaggtggtgacgccgttgcacttcggcatgcccaggttcgagttggcgccgatcttgtcgatgtgcctggtggtggtgatcatctttgtcgagtccaccgggatgttcctcgcgctgggcaagatcaccgggcaggacgtcacgccgaagatgctgcggcgcggcctgctgtgtgatgccggtgcgtcattcttcgccgggttcttcaacaccttcacccactcttcgttcgcgcagaacatcggcctggtgcagatgaccggcgtgcgctgccgttcggtgacgatgatggccggcgcgtttctgatcgtactcagcctgctgccgaaggcggcgtacctggtcgcgtcgatcccaccggcggtgctgggcggcgcggcgattgccatgttcggcatggtggcggccaccggaatcaagatcctgcaggaagccgatatcgccgaccggcgcaaccaattgctggtggcggtgagcatcggcatgggcctgatcccggtggtgcgcccggagttcttcgcgcaactgccgctgtggatgagcccgattacccacagcggcatcgccatggccaccctcagcgcgttgtcgctgaatatcctgttcaacattctcggcggttctgaacgacctgccgttgctcctacgcattgattccttcgttcgcacaaaaacaataacgaaacagggaacatcaacatgcacacccttcacctggggccggtcacaagccgtgccccattctcgccccgcgcgcgctgtaacggcgcacttgagcccaggcctgggagccagtattctccgcgcccgctcgaatcgactcaaaaaaaaacagcaaatgtaaaagctgactgcaaggccaacttatcccggcctcctgtctgcggccaaagtgcgcaaatgtcctctgaattcgactgcatctcatgcagccgacggggattttttggcttttttaacaccttggcgcagctcttgctaaaagcactaaagctgaccgaacagacgatttttgcagcgaaccaaaaggcgccacaccagagcgcctgcgtagaagaaaaaccataaaactttaactcgggagcaaccgaatgaaacctatgttcaaaggcctgatgctggcgggatccctgctggccggtggccaagccgtggccggtgacctgttgcagtggcagaacaacagcctgacttacttgtggggcaagagctttaccgtcaacccgcagattcagcaaaccgtcacgttcgaacatgccgatgcgtggaagtacggtgataactttgtgttcgtcgaccgcatcttttacaacggcaaggaagacggcaacgtcgggcccagtacctattacggcgaaatcagcccgcgcctgtcattcggcaaaatctttgataaagacctgtcgttcggaccgatcaaagatgtattgctggcctttacttacgagttcggcgaaggcgacaacgagtcgtacctgctcgggcctggctttgacttgaacatccccggtttcgattacttccagttgaacttctaccagcgccagaccgaaggcaatcgcccgggtgacggtgtatggcagattaccccggtgtggtcgtacaccatccccgtgggcaactccgatgtgctgatcgacggtttcatggactgggtgacggacaacgacaagaacgcccgtggcacctaccacgccaacctgcacttcaacccacaggtcaaatatgacctgggcaaggcgctgcattggggcgacaagcagttgtacgtgggctttgaatacgactactggaagaacaagtacgggatcgaagattccggcgcgttcaagaccaaccaggacacggcaagcttcctggtcaagtatcacttctaaaagccactgcaagacaaatgtgggagggtgcttgctcccgatagcggtgtgtcagtcagtacatcagtgactgaacaactgctatcgggggcaagccccctcccacatttggatctatgccaggcctaggaaccgagtgatttcctcacgtttggccagcgcatctttgcgccccagctcgatcaactcgctgcaatatcccgcctcgaacagcaggtaactcaacacccccgccccgctcgtcttggtcgcccccggcccgcgcaaaaacaagcgcaacgccgccggcagttcctggcgatgccgcgctgcgatctcatcgatcggctggctgggtgcgatcaccagcacctccaccgccgccacaccaggcgcgacatggctgaactggttcaagcgttcgagcaattcgatatcgccttccaggctgtcaatgaacgtgctgttgagcatatgcccaccgatctgcgccagggtcggttcctgaccggtgtagctgcgctgcaccgccggttcattgcctcgtgggttgccgctgacacccaccaccagcacgcggctggcccccaggtgcaaggccgggctgatcggtgctgattgccgcaccgcaccgtcgccgaagtactcctggtcgagtttgaccggcgcgaacaacaaggggatcgccgagctggccagcaggtgttcgaccgtcagttgagtcggcaggccgatacggcggtggcgcagccaggcatcgatggtgccgccgccctggtagaaggtcaccgcctggccggactcatagccgaacgccgtgaccgctaccgcatgcaggtgtttggcgcggatcgcttcgtcgatgccgtccagatgcagtttgtctttgagcaacgccttgagcggcgtgctgttgagcagtgccaccggcacttgcgcgcccaagcccagcaggctgtggataaagaagcgactcgcctggcgaatcactcccggccaatcactgcgcaacaccagatggctgcgaaagccctgccagaacgcggtaagacgttggatcgcggcggtgaagtcggtggcgccactggccaggctcaccgcattgatagcgccggccgaggtgccgacgatcaccggaaaaggattaggcgcccccggtggcagcaactcggcaatcgccgccaatacccccacctgatacgccgctcgcgccccgccgccggaaagaatcaagcctgtaaccggttcagctgggcgcattgcgtcactccatgtggggaaaagtcgttcttatcagcggcgtttttcgtacagcttgggttcacccggcggccggctcttgaagcggcggtgggtccacaggtattgctcggggcattcacgcacggaggcttctacccattggttgatgcgcaggcagtcgacttcatcgctttcaccgggaaaatcggtgagcggcggatggatcaccaggcggtaaccgctgccatcggccaggcgctgttgggtgaacggcaccaccagcgccttgcccagcttggcgaacttgctggtggccggcactgtggcagcctggatgccgaacagtggcacgaaaatactttgcttggcgccatagtcctggtccggtgcgtaccagatggcacgcccggcacgcagaagcttgagcatgccgcgcacgtcttcgcgctccacggcgagggaatcgaggttgtgacgttcgcggccacggcgctggataaagtcgaacagcgggttgccgtgctcgcggtacatgccatcgatggtgtgcttctgccccagcaacgctgcgcctatttccagggtggtgaagtgcagggccatgaggatcacgcccttgccatccaactgggcctgcttgaggtgttccaggccttcgacgtgggccaggcgcgccagtcgcgggcgcgaccaccaccagctcatggccatttcaaagaacgcgatgccggtggaggcaaagttttccttgagcaactgtttacgctctttggcggatttttccgggaagcacagttccaggttgcgtgcggcgatacggcggcgttcgccggccacgcggtacatgcccgcacccagcaggcgaccgatggtcagcagcgcgcggtacggcagttgggtgaccagccacagcaggccgagccccagccataacagccagaaacgcgggtgaaaaaatacagctcgaaaacgcgggcgatccattacagattccggtaaagacaagggccgcgcattctacaacggttcgacccggcttgcggcgggtgagtgttctcgttataagtctcgacacttttcgtgacaagccgcttttgccgaccatgagccaaaccgaaccgctagaccaagatcccgtgttccagctgaaaggcagcatgctcgccatcaccgtgctggaactcgcccgtaacgacctcgacgccctggaccgccagctggcggccaaggtcgccctggcgccgaacttcttcaacaacgccccgctggtgctggccctggacaagctgcccgccggccagggcaacatcgatttgcccggcctgatgcgcgtgtgccgctcccatggcctgcgtaccctggcgattcgcgccagccgtatcgaagacatcgcggcagccatcgccattgaactgccagtactgccaccgtccggtgcacgcgagcgtccactggaaccattggtcggtgaagagaagaaaaaaccggaaaaaccacccgagcctgcgatcaagcctacaaagatcatcacctcgcccgtacgcggcgggcagcagatttacgcccagggcggcgaccttgtggtgatctcctcggtcagcccgggggcggaacttctcgccgatggcaacatccatgtatacggcccgatgcgcggacgtgccctcgccggcataaagggtgataccaaggcccgtattttttgccagcagttgaccgctgagctagtgtccatcgcaggccagtacaaggtttcggaagatttgcgccgtgatccgctgtggggggcttcggtgcaggtcaacctgtcgggcgatgtgttgaacatcatccgtctttaacggatactgccgcattttccaagcatctctagactctgatagcacagcgaaaccggcattacttatgtaggaattttttattcctacaaggctgtccgcctgcagcgagttccaagagatgtttttcagggactgaaaagtcctttttccttaggggtgaaacaccttggccaagattctcgtggttacatccggcaagggtggtgtgggtaagaccaccaccagcgccgctatcggtaccggcctcgctctgcgcggccacaagacagttatcgtcgacttcgacgtcggcttgcgtaacctcgacctgatcatgggctgcgaacgccgtgtggtgtacgacttcgtcaatgtggtcaacggcgaagccaacctgcaacaggccctgatcaaggacaagcgccttgagaacctgtacgtgctggccgccagccagacccgcgacaaagacgcgctgaccaaagaaggcgtaggcaaagtcctggccgagctgaaggaaaccttcgaatacgtggtctgcgactcgccggccggtatcgagaccggtgctcacctggcgatgtactttgccgatgaagccatcgtggtgaccaacccggaagtctcctccgtacgcgactcggaccgcatgctcggcctgctggccagcaagtcccagcgcgccgagaaaggcgaagacccgatcaaggagcacctgctgctcacccgctacaaccctgaacgcgtcagcaacggcgagatgctcggcgttgaagacgtgaaggaaatcctcgcagtgaccctgctgggcgtgatcccagaatcccaggcggtcctcaaggcctccaaccagggcgttccggtgattcttgatgaccagagcgacgccggccaggcgtacagcgatgccgttgatcgcttgttgggcaagaccgtggaacaccgcttcctcgatgtcaagaagaagggattcttcgagcgtatctttggaggcaactaaacaatgaaatttctcgacttctttcgcgccaacaaaaagccaagtaccgcgtcggtagcgaaagagcgtctacagatcatcgtggcgcacgaacgcggccaacgcagcacgccggactacctgccagccttgcagaaggaactggtcgaggtgatccgcaagtacgtcaatatcggcaacgatgacgtgcatgtcgccctggaaaatgacggcagctgctcgattctggaactcaatatcaccctgcctgatcgttgatcgaacaggcggccgccacggcggctcggtcaccttgatcccttttcgggaaccgggtgggcgagccgccgttggcgtttgttacgaggctgtttaatgccgctgtccaatatccacatcctgtatcaggacgatgccgtcctggtggtgaacaagcccaccctgctgctctcggtgcctggccgcgccgacgacaacaaggactgcctgatcactcgcctgcaggaaaacggctaccccgaagcccgtatcgtccatcgcctggactgggaaacctcgggcatcattctgctggcgcgggatgccgacacgcaccgcgagctgtctcgccagtttcacgaccgtgaaaccgaaaaagcctacaccgccctggcctggggccaaccggaactggacagtggcagcatcgatttgccgctgcgctacgacccaccgaccaaaccccggcatgtggtcgaccacgagttcggcaagcatgcgctgaccttctggaaggtgctggagcgttgcggggactggtgccgcgtcgagctgacaccgattaccgggcgttcgcaccagttgcgcgtgcacatgctctccatcggccacccgctgctgggcgacggcctgtatgcccatgagcaagccctggccgcctggccgcgcctgtgcctgcatgcaagcatgctgagcttcacccacccacagagcggcgagcgtttgcgtttcgagtgccctgccccgttctgaagaataaatacggtaaactcgcggcattgttgtctggagctatttatgcgcgaagcgttgaatcaaggcctgatcgacttcctcaaggcctcccctactccttttcatgccactgctgccctggcccagcgcctggaagcggccggttaccagcgtctcgatgagcgcgagacctgggccaccgaggccaacgggcgctattacgtgacccgtaacgactcctcgatcatcgccttcaagctcggccgccattcgccgctgcagggcggcattcgcctggtcggcgcccacaccgacagcccgtgcctgcgggtcaagccgcagcctgagctacaacgccagggcttctggcagttgggtgtggaagtctatggtggtgcattgctggcgccgtggtttgaccgcgacctgtccctggccggccgcgtgaccttccgccgcgacggcaaggtcgaaagccagttgatcgacttcaagctgcccatcgcgatcattccaaacctggccattcacctcaaccgtgaagccaaccagggttgggcaatcaatgcccagaccgagctgccgccgatcctcgcgcaatttgccggtgacgagcgcgtggacttccgcgccgtgcttaccgatcaactggcgcgcgagcatgggctgaacgccgacgtggtgctcgactacgagttgagtttctacgacacgcaaagcgctgcggtcattggcctgaatggcgacttcatcgccggcgcacgcctggacaacctgctgtcgtgctacgccggcctgcaagccttgctcaccagcgacagcgaagaaacctgcgtgctggtgtgcaacgaccacgaagaagtcggttcctgctcggcatgcggcgctgatggcccgatgctggagcagaccctgcgtcgcctgctgccggaaggcgatgaattcgtacgcaccattcagaaatccctgttggtgtcggccgataacgcccacggcgtgcacccgaactacgccgagaaacacgacgccaaccacggccccaagctcaacgccggcccggtgatcaaggtcaacagcaaccagcgctacgccaccaacagcgaaaccgccgggttcttccgccacctgtgcatggcccaggaagtaccagtgcagagcttcgtggtgcgcagcgacatgggctgcggctcgaccatcggcccgatcaccgccagccacctgggcgtgcgcaccgtggacatcggcctgccaacgtttgccatgcactccattcgtgagctgtgcggcagccatgacctggcgcatttggtgaaagtgctgggcgcgttctacgcgagccacgatctgccctgataatttgggctgactcggtcaaaaatgtgggagggggcttgcccccgatggcggcggatcagtgactatatttgtagtctgaccctctgcaatcgggggcaagccccctcccacattagatctgcgtatacctgacctgcatcacctgcactttctgcaatccggcctagacttgtcagtattcccactccgacaaggccgtcccctcccatgatctccatgtcttccttccacgccatgcttatccctatcctgatcggcatgatcatgttggccgtgggtttcaactttcgcgacaagcccctcggcgtgttcggcatgtggctcggcatgctgctgatcctgggcaccgtggtgtacaagatcctcgccaaactggccgaatgacgcttgcactcgtacactcgctcaacccgtcgtttccaaggttgaccgcctcgtgctttcccgtctgtttgccctgccctgctattgcttgatcgccctgctcaccttgctgccgctcacgcctgcccatgcagtgggtttgcccggcttgctgggcagtaccaacaagacccagccccaggccgaagtgccactggggcagtcgctggacgaggtgatcaagaccctggaaaacgaccagcagcgcacccagttgctgagcgacctgaaaaagctgcgcgccgccacgcaaaaggcccaaccggccgccgaagaaggcgtgctgggcttgatcggcggcaccctggccaacctggaggcacagttctccggggccgacagcccgctggggcgctggtccaacgaagtcgacctggccaaggaagaactcgacgcactgatgctgccggccaatgaatggctgccgatcattttcgggtttgccttgatccttgccgtgtggagcctgttggcgtacgcgctgatctggctcagtcaccgggtgcgcgaacgtttcggcctgcccgaagaattgccgcaacatccacgcacctgggacatggtgcgcttcgccctgcgcaagctcggcccatggatgatcgccctggtgatcacggtgtacctgagctacgccctgccctcgtccctgggcaagtccctggcgatggtgctggcctacgcactggtggtcggcacctgtttctcggcgatctgcgtgatcgcgttttctgtactcgacggcccgcaccgtcatcgcgcgctgtatatcctgcgccaccaggcgttccgcccgctgtggtggatcggcagttttgccgcctttggcgaggccttgagcgacccgcgactggtccaggcgctgggccagcacctgtcccacaccgccgcgacggtcgccaatgtgatggcggcgctgtcgaccggtgtattcatcctgcgtttccgccggcccatcgcccacctgatccgcaaccaaccgctgtcgcgtcgcctgacgcgccgcgccctcagcgacaccatcgaaatcatcggctccttctggtacatcccggccttgctgttggtgggcatctcgctgttcgccaccttcgtgtctgccggcgataccagcacggcgttgcgccagtcgctgttgtgtacggtgctgctggtgttgtgcatggtgatcaacggcctggtccgtcgccacgcgctcaaaccgcagcgtgggcacaagcgtcacgcgctgtattccgaacgcctgaaaagcttcgtctacaccctggcccacctgatcgtgtggctggtgtttatcgagttgggcctgcgggtgtggggcctgtcgctgatccgctttaccgaaggcgatggccatgaagtcagcgtcaagctgttcggcctggccgggaccttgctgttcgcctggctgatctggattctcagcgacaccgcgatccaccatgccctcacccgctcgcgcaaaggcctggccaacgcgcgggcgcagaccatgatgccgttgatccgcaacgtgctgttcgtgaccatctttatcattgctgccatcgtcgccctggcgaacatgggcatgaacgtcacgccgctgctggcgggcgccggtgtgatcggcctggccattggtttcggcgcgcagtcgctggtggcggacttgatcaccggcctgttcatcatcatcgaggactccctggccatcgacgactacgtggatgtgggcggccacctgggcacggtggagggcctgaccatccgtaccgtgcgcctgcgggatatcgacggcattgtgcacaccatcccgttcagcgagatcaagagcatcaagaactactcgcgggagttcggctacgcgatcttccgggtggcgatcccctacaacatggaaatcgacgatgccatcaaactgatgcgcgatgttggccagaaaatgcgcaacgacccgctgcaacgccgcaacatctggtcgccgttggagattcagggggtggagagtttcgagtcgggcagcgcgatcctgcgggcgcggttcaagacggcgccgatcaaacagtgggaagtgtcgcgggcgttcaacctgtcgctgaaacggcatctggatgaggcggggttggacctggccacaccacgcttgagcgtgcaggtggtgacgggggcttcgggcggattagacaaagaaaaaaatacctgaaagcaacacagctcaaaatgtgggagggggcttgcccccgatggcggtgtatcagtcactcattagtcgactgacactccctcatcgggggcaagccccctcccacatttttgatctgtggcgtttacacgatcgcagtgccatccatcttctggcgcaggctcaacgggcgcatgtcggtccagacttcttcgatataggccaggcactctttcttcaggccgctcttgcccacggtgcgccagccttccggcacggccttgtagtcgggccagatggaatactgttcttcatggttgaccactacctgaaacaggatgtcgtcgcggtcaaatactgaggtcattgctgttctccatcgctaaaaggctggctgcgcaccgtgcgcagccctgatatctgtagaaacgtaccaggctggcaaaaaattagaggctggcgaccgctgccgccaacgcgcgaccgaagatgtccgccacccggtccacttcggcggcagtgatcaccaatggcggcaggaagcgcaccacactgccgtgccgaccgcccagttcgaggatcagcccgcgcttgaggcattcacgctgcaccagcggcgccaattggcgatgcacgggcggatggccttgaatgtccggcgtgccgttcgggtcgaccagttccacgccgagcatcaacccacggccccgaatatcccccaggtgcgggaagtcgcgctgcaggatgcgcaggtgttcacccaggcgctcgcccatggccgccgcgtggccggccaggtcgtgatccttgaggtagcgcatcaccgccgaacccgccgccatggccatctgattaccacggaaggtcccggcatgggcgcccggcagccaggtgtcgagccagtcgcgatacaccaccaccgccagcggcaagctgccgccgatggccttggacatcaccaccacatccgggatgatcccggcgtgctcaaaggcaaacatcttgccggtgcgaccgaaaccgctctggatttcatcgacgatcaacgccacgcctgcctgctcggtgatgcggcgcaggccgcgcagccagtccaggtcagccggaatcacgccgccctcgccctgcaccacttcgacaatcaccgccgccggcagcaatacaccggcctccggatcattcagcaggttttccaaataatgcaggttgacccgcacgccttccgcgccacccaggccgaacgggcaacggtagtcgtaggggtatggcaaaaattgcacaccattgccgagcaaggcgcccaggggtttcttcggccccaggctgcccatcaggctcaaggcgccctggctcatgccgtggtaaccgccctggaaggacaatacggtgctgcgcccggtggcggtgcgtaccaacttcaacgcagcttccaccgcatcggtgccggtggggccgcagaactggattttcgcttcccgcgccagcgcgggcggcaacaaaccgaacaggtcctgcacgaactggtccttgaccggggtggtcaggtccagcgtgtgcaggggcagttcatcggccagcacctgttgaatagcctcgatcacgaccggatggttatgccccagcgcgagggtgccggcgcccgccaggcagtcgatgaagctgcgcccttcgacgtcttccacgtaaatccccttggcacgcttgagtgccaggggaatgcgccgcgggtagctgcgggcattggattcctgctggcgctgacgggccagcagcggggtttcgtcgaactggtaaagcgtttcatgcacctgggcgtcttcgatacggctggtagcgactgacatttctcgatccctcaatacgctgatgatggtgaccaaactgccgatccgctggcgtctggccccaaggggcatgcgcacggatttcctgttctggaaacgcaccagcgtcgaggggatttagggcctttgatcactcaaaaccaaatgtaggagggggtttgcccccgattgcagtggatcagtcactggtgttgtgactggcagactgcaatcgggagcaagccccctcccacattggaactgcgttcggcgtcatagaccgcggtatttttcgttcagtgcatacaaaatcgcgcaggtctccgcatccagaaacccgcagtaatcccgcgcccgaaagtgcatctgaaacgcccgcgtcctctgttcaaacccttgccgattcttcgccggcgcatagccatagcgttgaaacgcccgctccacctcgacctccggcggcaggcccaggcaaaaccggcgctgatacatcgcccgcgtcgcctcatcaaaccaggcccccacccctgcttcatgcagacaccgccaaggcaggcgcggccccggatcgctcttgcgcccgaacgccacgtccgcatgcccgaggaggtcggtgggcccgatctgcgggtatcgcccaagaatgtcgcgaaccagcgcaatcaatacgtcgacctgttcctgcgcgtaggcaggaaagctgaacacgccaccgtcatcccgcgccaggttgacgatctcgatgccaatcgaacggctgttgaggttgtcgcgccccgcccaatgactcaccccggcgtgccaggcacgcttgtcttcctccaccaaccggaagacacgcagctcttcatagcccgccgcgcgatagtcgggctcatcagggtcgggcagcaagtagtgggcactcaccccatcctgagtcagggtacgcagggaggcaccaaaaggcgctgcggtgtaatgcaggatcacctgccgcacgggctcgccgttgcgttcgttgaagcctctggcagggaaactggtatcgatgaccaacatgagaaccgtccttttcaatacaggccgagtcgttcagcccgttcaagcgcaaaaaaattaccgccatcctgaaggcttgaacttcaggagggcggtaactatttggcacttgaaagaaaagtgatcagcagcgcaacggcatgcccaggtcgacgcgcaaaccatccggccgactgtcgaatttcaacgagcaggaacagcgttgcacgatcgcttgcacaatcgccaggcccaggccacagccttcgctgttaccgttgcgccagaagcgttgggtcaggtactgcaggtcctcggcggcaatctgtttgccgtggtcacgcacgcggaacaccacattatcggcttcggtgaacacgctgagctccacccgggtgtccgtcggcgtgtggcgcaacgcgttgtccagcaggttgcgcaaggcggcgacagcgaggcccaccggcatccccaccggggtggccgagaggttgtccggcaggatcaggtcgatgcgcgagttgtcaccggcattggcatcctggatcgccaggcgcgctacttcttcggcactggagtgcatgccatcgtcaaacgacaggttgccctccacccgggccagcaacagcaattgctccagggtccgatgcaggcggtcggcgccctcctcggcatgggccagggactggtcgcgggccgcgccctcggtcatgcgcgccacttgcaggtgggtcttgatcgcggtgagcgggctgcgcagttcgtgggcggcgtcaccggtgaggcggcgctcgcgctcgatggtcttggcgatgcgttgcaacagctggttctgggtgtcgagcagcggctcgagttcgctgggcaacgggtggatctgcagcggttcaagggagtcggcactgcggcgcatcaaggcgtcacgcatacggttgagcggcagcaggctctggccgatgcccagccacaacaggcacaggcagcccagcatcgccacgcccaccggcaccgacgctgccagcaggatcgacaggttcagcgcctcgcgctccacttgccgatcggccgtggtgatcagcaggtcaccccgggacagggtgaaactgcgccagcccacgccatcgacgacctggtcgcgaaacccgctcttgcgcgactccaacccctcatccggcgtggtgtggctgcgcgccaggatttccccgcgcagggaactgacctggcaggccatgccgccgggcacattcaattgttcagcgctgaaatgcgcgccgccgctgacgctggccaggcccggcatctgttcggtcagccccgccaccatgcgtgccgacgccaccaggcgttggtcgagggagaacatcatctggttgcgcaggtcgttgagcatccaggccgccgccagggcccagatcagcacaaaggcggcgcccagcttgaacgtcaggcgcagacgcaggcttttcacgatgcgtcctcgcctccatcggccgggccaaggcgatacccgaggccgcgcacggtctcgacgatgccattgcccaatttgcgccgcaggtggtggatatgcacgttgagcgcgttgctttccagctcgtcgttgaagccgtagacgctgtccttgagctgttcgctggagagtacccggcctttgttgtgcagcagggcttgcaacagcgcctgttcgcgacgcgacaggtcgacgggctcgccgcccaggaaggtttcgcgactgctggggtcgtaagccaggcggccatgctcgatcaggttgacgctgcgccccgccacccgtcgcaacagggtttgcaggcgcgcggcgagttcgcgcaggtcgaagggtttgagcaggtagtcatcggcgccggcttgcaggccgtcgacgcggttggtcaccgagtcccgcgcggtcaggatcagcaccggtatctccagaccctggctgcgctgttgctgcaacaacttgaggccgtcttcgtccggcaggcccaggtcgagcaccatgatgtcgaacgtcgccgccttgagcatcgcgcgtgcggcaccggccgtggccacgtgttcgacggtgaaaccctgggcggtgaggccggccacaatgccgctggcgatcagtttgtcgtcttcacagaccagtacgtgcatggtgaacccttcatgaaagatggggagattaaaggggctgcggattaagcgcagattatgccgctaaacaccccacactcaatctagaatagccgtggttaatcatcggttaatcaacgccacacattgtgtgcctacttgcatcgaactaaggcctgaccatgcggcatctgtttacctttctgctggtgttgttcgcggggctggcccaggccgcgccgggcaacccgtttgagaccaaacccgatttcctcccggtgggcaaggccttcacctttacctccgaacgtcttgaaagtggcgagacccagttgtattggcagattgccgacggctattacctgtacaagcagcgcatgaaattcgacggcctggccgaaaagcccgtgctgcccaaaggcgaggcccacaccgacgagttcttcggcgaccaggaagtgtatcgccaaggcctggaagtgaagattcccgccggcgccaccggccaggtcaagctgggctggcagggctgcgccgacgcgggcctgtgctacccgccgcagtcgatcaccgtggacctgggtggcaaccccgccgtcgccgccaccgcacaagcccaggaccagagcctggccagcggtttgcaacagcgcagcctgggctggagcctgttgatattcttcggcctcggcctgttactggcgtttgcgccgtgttcgttgccgatgttgccgattctcgccggcctggtggtgggcagtggcgccagcccgcgtcgcggttttgccttggcgagcagctacgtggtgtgcatggcgttggtgtatgcagcgctgggcgtattggccgcgcttttgggtggcaacctcgccgcttggctgcaaacaccttggattctcggcagcttcgccgccctcttcgtggttcttgccctgccgatgttcggcttcttcgagctgcaactgccggccttcctgcgcgaccgcctggacaacgtcagccgccagcaaagcggcggcagcctggtgggggcagggattcttggtgcgctatccggcctgctggtgggcccgtgcatgaccgcgcccctggccggcgccctgctgtacatcgcccagagcggcaatgcgctgcacggtggcctgatcctgttcgccatgggcatcggcatcggcattccgctgttgctgctggtgaccgtgggcaaccgcttcctgcccaagccgggcacctggatgaacgtgctcaagggcatcttcggcttcctgttcctcggcaccgccgtgttgatgatccgcccggtggtcggcgaaaacctgtggatcggcctgtggggcgtactcgcgctgatcatggcctactgcggctggaccctggcccgcgaatacggtctggccgccaaagtgtttggcgcaggttccctggtactgggcctgtggggcgcggtgctggtggtgggcgcagcggggggcagcgacgacctgtggcaaccgctgaaggtctacagcggttcacgggtcgccggcgcagcgtccgcccacgatgccttcatgaccatcaacgacccggccgtgctgcaaagccagctcgacagcgccaaggcccaaggccaatgggtgttggtggactactacgccgactggtgcgtgtcgtgcaagatcatggaaaaacaggtgttcggcaaacccgaagtcatgcaggcactcaaagacgtacgcctgctgcgcctggacgtcaccgccgacaacgccgccagccgcgcgctgctcggccgctacaaagtgcctggcccaccgagcttcgtgtggatcggcccggacggtgaagaacgccgcgcccaacgcatcaccggcgaagtggatgccgccgctttcctgcaacgctggacgcaaacccgagacgctctctgatgctgaccctgaccatcggcaccttcgccatcgccctgaatcacatcctgctgatcagcgcgctgattctcgccaccctggtgggttggcgcgtggccaagcgtggtggtgaaaacccggaatcggtgctgttcagcctgttcctgctgggcatgctcgctgcccgcgtcagctttgtgctgatgtactggagcgactaccgcaacgactgggtgcagatggtcgacctgcgcgacggcggcttccttgcctggcccggcgtgatcgccctggtcttgggcgctctcgcctacggctggcgccgcccagccctgcgcaagccactgagcgccggggtgatcaccggcctggtgttctggggcatgaccagcttgtccctgagcctgtatgacaagggctcgcagttgccggagataaccctgcgcaatgccaatggcgaggtggtgcaattggccgactacaagggcggcccgctggtgatcaacctgtgggccacctggtgcccgccgtgccgccgcgaaatgccggtgctggagcgtgcccaacaccaacgtcccgacgtgaccttcctgttcgtcaaccaggccgaaagcatgcagagcgtcagtacctttcttgcgacccagggcctgacgctggacaacgtgctgttcgacgccagcggccgcctcggccaggccgtgggctcgatggccttgccgaccaccttgttctatcgagccgatgggcgcttgatcaacagccacctcggcgagttgtcccaggccagcctggcccgcgccatggaacccttcgacaccgcccctgaaaggaaaccgacatgccaagcctccgccacctgctgaccctgctgccgctgacactcgcggccaccctggcccaggccgaagactggcccgcaccgatcaaacagatcgaggccaagggcgccaagatcctcggcaaattcgacgcccccagcggcctcactggctacgccgcccgctaccagaaccgtggcatggccctgtacctgaccgccgacggcaaaagcgtgatcgccggcaacctgtacgacgcccaaggcaacgacctgagcagcgcgccgctggaaaaactggtgtacgcaccgatggcaaaggaagtctgggccaagatggaaaaaagcagctggatccaggacggcgacgtcaaggcgccacgcatcgtctacctgttcagcgaccccaactgcccttactgcaacatgttctgggaacaggcgcgtccgtgggtaaaggccggcaaagtgcagctgcgccacatcatggttggcatcatccgcgaagacagcccgggcaaatccgccgcgctgtttgccgccaaagacccgcagaaagcgttggaagaacatgaggccgccggtaaaggcagcaagttgcaggcgctggccaagattccggcggatatcgaggccaagcttgatagcaacatgaagttgatggatgagctggagttgtcggcgacgccggcgattttctatctggatgacaagggggggttgcagcagcagcaaggggcgccttcgccggagaagttggtgaagatacttgggccgaagtaggcggcgccttgactgacgccatcgggggcaagccccactcccacattagaaatgcgctccaaatgtgggagggggcttgcccccgatgaggccctgactgacagcgaaaattaaagcccctccaactccgccatcaaatcactcaaccgatccaccttctcggcactgatctcattcgccgccaacccctcgatatactcggccaactccgccaccgtgctgcactcgaacatcgcccgcagcggcacatcccgctgcaaggtcttctgcacccgcgaggcaatctgcgtggccagcaacgaatgcccgcccagttcgaagaagttgtcctgcacccctacccgctcgactttcagcacttcggcccagatgtctgccaaggtggtttccagctcattgcgcggtgccaggtagtcctggctgtgcaactggccgatctccagcgccggcagggccttgcggtcgagtttgccgttggcgttgagcggcaggcggtcgagccacagccagtgcaacggcaccatgtattccggtagctcggcgcgcaggcgttgcttgatgcggtccaggcgttcgcttgggttcagtgcctcatccgccgccaccagatagccgaccaggtgcttgccgttgacgccctcctgcacacccaccgccgcgtcgcgcacttccggttgttcgtgcaggcgcgcttcgatttcacccagttcgatgcggtaaccgcgaatcttcacctggtggtcgacacgtccgacgtattccagcgcgccatcactgcgacggcgcgcgaggtcgccggtgcggtacaggcgctcgcccggcgcaccgaacggattcggcacaaacaccggcgcagtgcgcagcgggtcactgacataaccgcgaccaacgcccgtaccggcgacgcacaactcgcctaccgcaccttggggcaccagctccagcgcaccatccaacaggtacaaacggttgttgtcggtcggcgtgccgatcggcagataggtgcctcgggtcgacgccaggtcgacgcgataaaacgccacatcgtccgagcattccgccgggccgtaggcattcaccagcccgatctgcggataacgctgcaaccattgatgcgccagttccggtggcatcgcttcaccggtcggcaacatccagcgcaggccgtccaggccgatacggtcctgggccagcatgccctggatcagcgacggcacgctttccagcacggtgatgccctgggcctgcacatgttccaacaggccctggggatcatgcgcgatagtgttcggcacgatgtccacccgcgcaccgaacaacggtgcggcgaggaactgccacacagaaatatcgaagctctgcgaagcggtctgcgcgatcacatccgcgtcactcaaggccaggtacggcaccttgctcaactggttattgagcatgccgcgctgttccaccatcacgcccttgggcaggccggtggagcccgaggtgtagatcacgtaggcgaggttgtccgggccgctgtagattcccgggttttcaccacgtgccggtatctcttcccacaccagcaattggcaatcgaagccgtccagcaactcgatggcctgctcgcggcacacctcggtgcacaccagcagcggcgtgcggctcaggtcgatgatgctgcgcagacgctggcttggcaggcctgggtcgagcggcaggtagccggcaccggccttgaagctgccgatgatcatgcccagcaggtcaaggttacgttcgcccagcaacgccaccggttgatcgaggcccacgccggctgcaatcagcgcatgacccaggccgttactgcggcggttcagttcgtcgtaggtccactgctgatcgaggcaactggcggcgatgcgctgcggatgcgcggccacctggtcctcaaacaactcgacatagctgcgctccagcggataggcgtgctcgctctggttgcagccctccaccaggaactggcgctcctgttcgccaatcaacggcaagtccgccatgtcgccatggaagccctgcaccagcgccagcagcaggcgcttgaactcgccgagcatggcttgcacggtggtctcgtcgaagtagcgctggtcgtaggacaggtgcagccccaggtcatcccccggatagcacacggccgtcagcgggaagttggtgtgggtgcggccggagtccgaggtggcattcaggctttgtgcacggtccagcaccgagacttccaccggggcgttttcgaacacgaacaggctgtcgaacagcggctggcccttgggcagttcgctgtgttcctgaatcgtcaccagcggcaggtattcgtactcgcgcagttgcatattgctgtcgagcaagccgctcaaccactggcgcacgctgcaacgctggtcgtcctcgggcagcttcacccgcagcgcgatgctgttgatgaacaggccaacggtgcgctgcatctcgggcatctctaccgggcgcccggccactgtgacgccaaacagcacgtcacggtcgccacttaaacggcgcaataccagcgcccacgctgcctgggcgaaggtattgaccgtcagttggtgagcctgggccagctcacgcaattgtgcaccgtcgcgagcgtcgaggcgggtgtaacagtcgcccaccaccatgccaccgtggccggcgtggtcacgcaggaacggccggtcactcgggattggtgtggtgcgctcgaaaccttgcaggttgtgctgccaccactgacgtgcttcgctcaggttctggcgttgcagccaggcaatgtagtcgcgatagcgcggcggtgtggccagttgcgcctcgcgcccctcgccgagggccatgtagatctcgaagaagtcattcatcagcaacgaacggcaccaggcatcgatgaggatgtggtggttgctcatcatgaaccagtagcgctcggcgccgacgcggatcaggcgcaggtggaacggggcctggttgagcagatcgaaaccggcttcgcgctcctgcttgagcagtgcttgcaggcgcggctcatgttcgctttccgggtcagcactccagtcgaggtattcaattggcgtgctgcccggtgcgtggatcacttgcagcatgtcttcgccgatgttccagcagaacgaagcgcgcaaggcttcgtgacgggcgatcaccgcctgccaggcctgggcgaaacgctcggggtcgagggcgctgttgatgcggtagcggtcctgcatgtagtagaggccggtgcccggctccagcaaggtgtgcagcaacaggccttcctgcatcggtgtcagcgggtagacgtcttcgatgacactggccggcaccggcaggctgtcgagttgcgcctgggtcagatgggccagcgggaagtcggacggcgtgaggccaccggcatcgtcctgcaagcagtgccgggtcaggctgtgcagttcggccaggtaggcctcggccaattcacgcaccgtgtgctgatcgaaacgctcacggctgaaggtccagcgcagcaccagttcgccgccgtacacctggctgtcgatgctcaactcgttgggcagcggcgcgtccgggtcatgggccaggccggcggactcgtccagcgggtggaacagcgcatcggcgccgaagctctggtcgaactggccgaggtagttgaaggtgacctgcgcgctcggcaaggcggccatgctgtgcttgcacacatcatcggccaggtagcgcagcacgccataacccaggcctttatgcggcacgccgcgcagttgctccttgatcgccttgatcgaatcgccctgcccggcctgcggggtcaggcgcagcgggtaggcactggtaaaccagccgacgctgcgggtcaggtcgatgtcatcaaacaggctttcacggccgtggccttccagctggatcagtgccgaagcatggccagtccagcggcacagcacacgggccagggcggtcagcagcaggtcattgacctgggtgcgataggcactcggggcctgttgcagcaactggcgggcgtgttcggcatccaggcgcacgctgacggtgtcggcatcgcggttgcgcaacgaaccgtgcgggcgagtcaccggcaaccccacttccggtccggccaattggtcctgccagaggctcaattcttcacgcagggattcgctgccggcatacgcctgcaaacgcgcggcccaatcacgcagggcactggtcttggccggcaggctgaccgattggccgtcactcagttggcggtagaccgtttgcaggtcttcgagcaggacgcgccaggacacgccatccaccaccaggtgatggatcgcgatcagcaggcgttgctgcccttcgggaccgtccaccagcaaggcgcgcagcagcgggccgtgttgcaggtcgaggctgcgctgggtgtcggtgaacagcgcggtgcactgcgccatatcacgcacttgcgcctgcatcagcacgccgccttccggcacggccagatgctcggcgtgccaccgcgcgtcgcgctgggagaagctcaggcgcagtgcatcgtggtgttccagcaccgccagcagcgcttgctccagacgatggggttgcagcagttgcaggggcttgagaaccagcgcctggttccaatgctgacggttagggatctcgttgtcgaagaaccagtgctggatcggcgtgaggcccgagctgccggtgagtacgccttgctcggcggtgatctgctcggagcgcgaggccacggcggccagggtttgcacggtctggtgctggaacaggtcgcgggggctgaaatgaatcccggcctgccgcgcacggctgaccacttggatcgacaggatcgagtcgccacccagttcaaagaagttatcgtccaggccgacttgctgcacattcagcaccgcacaccagatcgcggccaacgtctgctcaagctcgttgcgtggtgctacataggtctggcgattcgcctcgggatccggttgcggcaacgcacgccggtcgagtttaccgttggaggtcagcggcatgctgtcgagcacgatcaggtgtgcgggcaccatgtagtccggcagttgcgccttgagatgcgccttgagcgcatcgcgcaatgcgccgtgctcggcatcgctgaccaggtacgccaccagctgcttgccactcggcgaatccagcgccagcaccaccgcttcacgcacggattcatgttccagcaggcgggtttcgatctcgcccagttcgatacggaagccgcggatcttcacctgatggtcgatacgccccaggtactctaccaggccatcggcgcgttggcgcaccaggtcaccggtgcggtacaggcgcgcaccgttgctcgcaaacgggtccgcgacaaaacgctcggcggtcatgcccggacgctggtgataaccctgggccaggccggcgccaccgacgaacaactcgccggtcgccccttgcggcaccaatgccatgtcggcatcgagaatataggccacgcgctcaccgatgatgctcccgatcggtacgctggccgcgccctcctccaactgctcgggcgcgaggctggccagtggcatcaccacagtttcagtcgggccataggcgttgaagaacacctgcggctggaacgcggcgcggatgcgctgcaagtgttcgccggtcagcgcctcgccgccggtgatgcacatgcgtaccggcaacgtctgctgctgggtcgccagccattgcgccaactggctgccgtagctcggcgtaaagcccaggatagtgatgcgatagctgcggatcagcccgcagatttcttctgcatcccactggccctgggcccgcaacaccacctgcgcaccgctgagcaacggcaccaacaggcgctcggtggcggcgtcgaagttgatcgaatagaagtgcagctcacagtcgtccgggcgcatgccgaaccgctcgatcaccgccgcgcaatgcatggcgatttcaccgtgggccaccaccacgcccttgggcttgccggtagagccggaggtgtagatcaagtacgcctgatggtgcggcaggctgataaacggcagctcatcggacgggtagttggcgagtaccggcaaatcatcttccaggcaccagcacgccacggtcgccggcaattcgcccagcgcttcgaacatcgctgcgtcgctgagcagcaggccgatgccgctgtcttcgatcatgtaatgcaggcggtccagcgggtattccgggtccagcggcacataggcgccgccggccttgaggatcgccagcaggccgatgaccatttccagggaacgtggcagtgccaaccccacacgcacttgcgggccgacgccacgctcgcgcagcatccaggccaggcggttggcgcgggcgtccagttcgcggtagctgagggtcacgccggcgaaggtcaacgcgggcgcatcgccacgggctttcgcctgctgactgaacagcgtgtgaatgcactgatcaaggcggtgctcgcccgcttcgacgcccaggctgtcctgcaacgcgcgctgttccgtggcgctgagcaacggcaattcgctcaggcgctgctcgggactggcgatcagcgcttccaacagattgcgccaatgttccgccatgcgcgcaatgcgcggctcgtcaaacaaatcggtgctgtaggtcaggcagcaacccagacgatggtcaaggtcggtgacttccaggttgaggtcgaacttggtcgcccgcgcatcgttggccaggtactcgacggtcatgccagccagttggcggttctgctggaattcccagcgctgcacgttgcacatcacctggaacagtgggttgtaggccgcgctgcgcggcggttgcagggcttccaccaagtggtcgaagggcaaatcctgatgggattggccttcgatcacagtgtggcgcacctggtcgaacagttcagccacgttcatctgcccattgagctggcaacgcagcacctgggtgttgaggaacgcaccgatcagcccttcgctttccgggcggatgcggttggccacgggcgcgccgatgcgcaggtcggtctggccgctgtagcggtagagcaacacggccagggtggcggtcatggtcatgaacagggtcaggccgtgttcggcgttgaaagcacgcacgcgggcggccaggtcatcgctcaaatcgaagcggtacaactcgccccgatggctttgcacgggcggacgtggacggtcgccaggcagttcgagcagcggatgttcggtgcccagttgccgagtccagtaatccaactggcgctgacgttcacccgcttccatccactggcgctgccacacgctgtagtcgaggtactgcaccggcaacggcgccagcggcgacaggcgttcgtcgataaaggcttcgtacaacgcgctgagttcacgggcaaagatgtccatggcccagccttcggtgacgatatggtgcagggtcaacaccaggtaatgttcgcgctcggcggccttgaccaggcaggcgcgcagcaacggcccggtttccaggttgaacggcgtatgcgcctcgtgatcggccagttgctgcaagcgctgctggcgttcgctttcgtccaacgcggagaagtcctgccagtccatgcgcaggccggtctgcgtcgagaccttctgataagccacaccgtcgatactcggaaaggtggtgcgcagggtttcgtgccgcatgatcagcgcttgcaacgccgcctcgaaacgccccacgtccagcacgccacgcaagcgcgccatgccaccgacgttgtaggccgggctgtccggctccatctgccagaggaaccacatgcgctgctgggaataggacaacggcaccggctggctgcggtcgaccttggcgatggcggtttgttggttgcgttgccccgacgcctggatcagcccgacctgttcggcaaaagcgcccaactcgctggcttcgaacaaggtgcgcaacggcaactcgacgtcacacgcctggcgggtgcgggagatgatttgcgtagccagcagcgagtggccgcccagggcgaagaagtcatcgtgcaggccgattttcggcagaccaaggacttcgcaccagatctcggcgatctgctgttgcagcggcgtttcaggctcgacgtgctcacgggtttgccacaccggctccggcaacgcgcggcggtcgagcttgccgctggggctcaacggcatggcgtccaggcgcatcagcagcgccggcaccatgtactccggcagttcggcggccagggcgctcttgacctgctgttcgcccagttcggcatgggcggtgtagtagccgatcaactgggcgtcacgcaccagtaccacggcctgggcgatgccgtccagggcgagcaggcgcgcttcgatttcctccggttccacgcggaaaccgcgcagcttgacctgttggtcgagacggccgaggtactcaagcacaccgtcggcgttccagcgggcacggtcgccggtgcggtacaggcgcgttccttggtggtcggcgacaaagcgctcagcggtcaacccaggacggccgaggtaaccccgcgccaggccgataccgccgatgcacagctcacctggcacgccaacgggcacggggttgagctgctcgtccagcacacggcagatcacattgcccagcggacggccaatcggcgagcgttcgccatcctcggcgcggcagtgccagtgggtcacgttgattgcggtttcggtcgggccatagcggttgtgcaattgcaccgccggcaactgggccaacacgcggttgcgcagctcggcaggcaaggcttcgccaccggagaacaggcggcgcaggctggtgcattcggccaccagcggttcatcgataaacagctgcaacaacggcggcacaaagtgcagcgtggtcacgccgtgcgcctgcaccaactgcgcgatgcggtgcgggtcgcgatgctcgccggggccggccagcaccaggcggcaaccgctgatcagcggccagaagcattcccacaccgacacgtcaaaactgatcggcgccttttgcatcagcacatcgctggcgtcgagttgataagtggcctgcatccactgcaagcgctcggccaatgccgcatgggtattgcccacgcctttgggctggccggtggaaccggaggtgtagatcacataggcaaggttatcgccgtgcaggtgcaggccgggcggctgggtcggccagctgtcgaggtgcaggctgtccatggcgatcacgcacacgccttctgcattcggcacttgctccagcagggcggtctgggtcagcagcaggtggacgccgctgtccttgagcatgtaggccaggcgttcggcggggtagtccgggtcgagggggacataggcaccgccagccttgatgatcgccagcaggcctatcaacagttgcggcgaacgctcggcggcgatggccacgcacacgtccgggccgacgcctttgtcgcgcaggtaatgggccagacggttggcctgggtgtgcagttgggcgaaggtcaggctgccgccgtcccagaccagcgcggtgtggtctgaagtctgctggctgagcaggtcgggcagccactgttgagccggcgcgcagggggcttcgctgtaacgcgcctgttcgtcgtgctgcatcagcatgaggtcgccgatggcttgctcgggctgttcgcagacagcgtgcaacaggttgatatagtgctcggccaggcgctggatagtcgcgttttcgaacagctcatcggcgtagtcgaacgacaggctcaagcgcccgttgcggtcctcttcggtgtgcagttgcaggtcaaacttggcttcacggctgtgccacggcagctcgtcggcgagcatacccggcaggcggcgcaaggcactgaggtcgcgttgctggtggttgaacatgacctggaacaggccctgttcgcgggcttgcgggaaagcttccaacagttgctcgaacggcaggtcctgatgggcctgggcgcccaaggccgtctggcgcgtggcggccaacagctcgttgaacggcaggcgcccatccagctccgcacgaagcaccagggtgttgatgaagaagccgaccaggccttgggtttcctggcgcgggcggttggcgttgggcacgccgatgcggatatcgcgctggccgctgtagcggtagagcaggctctggaacgctgccagcaacagcatgaagggcgtggattcgttggcctgggcggtctggcgaatggcttcgctgaggctcgcacccaagcgcacgctatggcgcgaggccgtatggcggtggtgtgccgagcgcggatggtcggtggccaggctcaggctcgggtgttcttcacccagttgcgttttccagtacgccagttggcgctggccttcgccttcggccagccattggcgctgccaactgccgtagtcggcgtagtgcagggccaggggcggcaacgccagagtctggccctgggcagcggcggcgtagaggcgtgagaattcatcgataaggatattcagcgaccagccgtcggcgatgatgtggtgcagggtcaccaacagttggtggtcttcatcgtccaggcgcaccagggtcacccacagcagcgggcctttttccaggtcgaactgggtgcgcgcttcgtcttcgcggatctgttgcgcacggccttcacgctcggctgcgggcaggtcgctgaggtcgatgatctgcaggtcgaaatcggccttggcagcgatccgctggaaagcctggccgtcgcgttcgtagaagcgcgtgcgcagggcttcgtggcgctggatcaactgctggaagcttgcgcgcaccgcgtcttcgtctaactcaccgcgcaggcgcagggcaccagggatggtgtaggcgctgctctgcgggtccagttgccaggtgatccacaggcggttctgtgccagggattggggcagttcctcgtgacgggacaggtggtggatcacgccttgggcgacgccgccatcctgctgcaattgcgcgacagtcgcggcaaaaccttgcagggtcggcgcttcgaacagcaggcgcaggctcagctccaggccaagggtttcacgcaggcgcgcgaccacttgggtggcgctgatggagttaccgccgagcaggaagaagtggtcatcggccgcaacggtcgcgacctgcaactgttcgcaccagatcgcggcgatctggttttgcaggtcggattccagcgccccagtgcgcgcctgcgcttgcagatcggggaactgcgcatagcggtcgaggctgccgtccttgtgacgaagcgcacacgccgcgcgttgcaccttgccgctggaagtcttcggcaacgcgccggggttgagcagtaccaccacgctcggcgcctcctggtacgcctcggcgacggcctggcggatcgccttgatcagcgcttcgggcggcaggattttctgcacgctgcggctgatttcggcggcaatgccgatgccttccaggccctgatcattcaccgcaaacgcggcgacccggcctttgcgcaccacttcgacttcgcgttcgatggtctgctcgatgtcctgcgggtacaggttgtggccgcgcacgatcagcaggtccttgaggcggccggtgatgtacacctcgccgtcccggataaaccctaggtcgccagtgcgcagccaggtacggccggcgtgttgcacgaaggtcttggcggtggcctcgaggttgcgccagtagccgtgggcgatgctcgggccgctggcccagagttcgccgacgtggttgtcgggcagttcggcgaggctgtgcgggtcagcgatcagcacagcgtgttcaggctggctggtgccgcaactcatgatcgcactgccctgccccggctcggcgcggttggcggccagggcctgctcgtcgacgcgcagcgcgggaatgccatggccacgagtgccaccggcgacaaacagggttgcttcggccaggccgtaggaggcgaagaaattattcggggtaaaaccacaggcggcgaacttctcggcgaagcgttccagggtgtcgatgcggatcggttcggagccggaatacgccacgcgccactggctcaggtccaggcgttccagggccgagtcgctgacccgctcactgcagaggcgataggcgaaatccggcccgccactgatggtgccgccgtattcgctgatcgcttccagccagcgcaatggccggccgagaaagtaggccggcgacatcagtacgcacggcacgccactgaagatcggttgcagcaggccgccgatcaggcccatgtcgtggtacagcggcagccagctgacgatcacgtcgtcggggtttaggtcgatgccgaaaccgcgccggatcagcacttcgttggccaccaggttgccgtggctgacttgcacccccttgggcagcgcggtggagccggaggtgtattgcaggaaggcgatgtcatcggggtgcaggtcgggggcggtccagtcgccagcgctctgcaaggtatcgacgctcaggaccggcggcgcgttgtcgatctgcgccaggccatcggcgagactggcgatggtcagcaacaggcgcggctcggcatcgctgatgatcgacagcaggcgctcctggtgatggcggcgggtggactccggcggatacgccggcaccgcgatcacccccgcatacaggcaaccaaagaacgccgcgacataatccgcgccgctggggaacaacaacaccgcgcggtcgcccagttcggcattggcctgcaacgcagcggcaatggtgcgggcgcgcaggtcgaggtcgcggtaactgagcacaacgctgtgctcggcggattcggcgaggaagcgcagggcaacctggtccggggtctgcgcggcacgacattgaagggactggaccagggtgcggggaagttcgaaggcgtccatcatggggttcctgcctgaaatcggcttacgggaaattcaacaattcggggggggttgttcagccgacggcgagtggccgcgccgcgtcgttgcgccagcgggccaggtgttcgtcggcgtagcgccgcacgcagcgcagcacggcgctttcgtgttgcacgaggaagaagtggtggccgtcgaacatgtccagggaaaagccgctggcggcgtcgagttgccagtcgagcaactggtcggcgcgcacgctgtcctgcttgccgccgaacacatggatcggcatgcgcagcggcgcacgctcgccgtaggtgaagctgccgcacagcaggaaatcggcacgcaggatcggcagcatcaactgcatcaactcggggttggccagggcttcttcggtggtgccttgcagttcgcgcaagcgggcaatcagttggtcgtcggtcttttcgatggcgtactcgctgacatcacgacgggctggcccgggtgtgccggaggcgaacaaggcgagcggcgccggcacaccacgagcgttcaaggcatgggccaattcgaaggcgagcaggccgccgaggctgtggccgaacagggcatagggaccgttcagatcgcggctgatttcatcggcgagctgcgcggccagggccttgatatcgcgttgcaacggctcgtccatgcgcatgccacggccgggcaattccagcgggcatacctgcaaccactcaggcagcgcccggcgccaacgcgcatacaccatggcgctggcgcccgaatagggcaggcagaacagccgcagtcgagtcagcgtactcatcgagtgacgactccaaactgaaacacgctgtatgcacgatagaaacccatttcgtcctcctgcgggtgctgatccttggccgttttactaacggacctgtcacccagaagaacggacggcaccggcaaataattagtcgccgggtacaagcgagacgtggttcacaccgaacaagaaagcataagattagttcgtcttctcatttgacaatcattatcattcagcataatttgttgcccgatgtgtaggaggccccggcaaggacgccctcccctaacctcttttgcgacaaggtgatttccatgacggaacaagtatccacaggcaggtgcgactcaccgcttctccaggcattcgtcgataaccggctgattctggtgaagatcgcggcccgcattaccggctgccgctcccgcgccgaggatgtagtgcaggacgcctacttccggctgcaatcggcgccgacgatcacctcatcgttcaaggcgcaattgagttatctgttccagatcgtgcgcaacctggccatcgatcactaccgcaagcaggccctggagctgaaatactccgggacggaagaggaaggcttgaatgtggttattcacggcgcttcaccggaaacctcgcacatcaatttcaacaccctggaaaacatcgccgacgccctgacggagctgccccagcgcacccgctatgcgttcgagatgtaccgcctgcacggcgtgccgcaaaaggacatcgccaaggaactgggcgtatcgccgaccctggtgaacttcatgatccgtgatgcgctggtgcactgccgcaaggtgtcgggcagccatagcgatacgtttgcgcgcagggtttgacacacctgagactcagggtgggagggggcttgcccccgattgcatggggccaatcaccggtgttgtgactgcacagatgccatcgggggcaagccccctcccacatgtggttcggtggtatgcctgtcagtccgcgggcatcacatcaatgcgatacggctcgaaaatcttcagcatctcgccatcgtcgcgcaaacgcttgagcaacgcggcaaacgcgtcccccgtgatcggcgctttcgggcgcaacaacgcgtagtggtgatacacctggtcgatgcgctccgagaccaggaactgccccgccatctgcgcattgcgcaccatgaaatcactcaggtacgagcgcgtcaccaaggcgatatcggcacgcccgcgcgcgaccatcagcaggttgctgtcatgggagtaggtcaacgtggcgttgaagtgctcggccatgtacttggggtcggggttgaagttggcgaaggcgtagtgataaccgctgaacaccgccaggcgtttacctctcaggtcagcgaaataactttggtcacgaccgggctcacgctgggcgacgaagatttccgcatcttccaggcccatgtcgaccgacgtgtgggcaatctcctgccagccccaggcagggttttcgaagatcgccatatccacgcggccctgctcgaaatcgcgaaaacgtcgcgggatggaggtgggcaccaagacaaattggtagtcggtttgcgcggcgttcagggcttcgaccagttgcggcagcaaaccggtgtcggcaccctgctccggtcgcacagtgtagggtgggaaatgcgccgcgccgatgcgtaccaattgcgcagccgaagccggcatccaccacgcggtgcccagtgcccaaaaggtaagtcctgcagccagccgccatggcgaaaacatcaaggcacgcaccgttcaaaaacgctcatggcgataagctaggcgtttttgtctggagagacaactttccagcggtaaattaatagcttgcgcctcaatcggccttcaaaaccatcagcagggcttcttcggccaactgctccagcgtcaggctgccctcggcgcgaaaccaggtggtggtccaggacagtgcgccggtgaggaaacgccgcgtgataaatacatccccacggatgtagcccgcatccttggcctcccccagcacttgcagccagagcgcctcgtacacatcgcgcagggccagcacctgggcctggccttcggccgacaacgaacgccactcgtacaccagcaccgccatggcctcgccgctgccgcccatgatcgactgcaattcgcagcggatcagcgccagcacgcgttcgcgcacgttgctcgcctcttccagcgaagcgcgcatcatcgcggtgttgtagtggatggtttcttccatcactgcgcgcaggatctcgtccttgctcttgaagtgatgaaagatactgccggactggatgcccacggcgctggccaggtcgcgcacggtggtacgttcgaagcccttgttgcgaaacagatgggccgcggtttgcagcagcttgccccgggcactgtcggggtcggtcaattgcccgccatcgaccatggtgcgcatgacccgcagggctttgtgctcatccatgcctctctcctctacttccacggacgtcttggcccgcaatttaggccgtggcggccacccaagcaagcgcttggctgaaacttgtatccgcagtttacaaaccaagcgcttgcttggtagtctcgaccccagccattcgaggaaggatttctcatgagcaagacggttcgtatcggctgtgccagcgccttctggggcgacacctgcaccgccgccgcccaattggtgcagggcggccagctggattacctggtgttcgactacctggcggaagtcacgatgtcgatcctggccggtgcgcggatgaaagatccccagaccggctatgccacggatttcgtcgaagtgctcacgccgctgctggccgatatccagcaccagggcattcgcgtgatcagcaacgccggtggcatcaacccccaagcctgcgccaccgccctgcaaacggcctgcgacaaagccgatattcccttgaaaatcgccgtgttgctgggcgacgacctgcaaccccaactcaaacacctgcatggcatcaccgacatgttcaacggcagcccactgccgccgttgtgcgtgtccgccaacgcctacctgggcgcacccggcatcagccaggcgctgaagctgggcgcggatatcgtcatcaccggccgcgtggtggacagcgcagtggtcagcgcggcgctggtgcatgaattcgactggtcctggcaggattacgaccgcctcgcccaggccgcactggccgggcatatcatcgaatgcggcgcgcaatgcaccggaggtaacttcaccgattggcgcgacgtaccggactacgagcacatcggctttcccatcgtcgaagtcagcgccgacggccaattcaccgtcaacaaggtcgacggtacaggcggcttgatcagcgaactcagcgtcgccgaacaactgctgtatgaaatcggcgacccgcacgcctacctgttgcccgatgtgatctgcgatttcagccaggtcaaattgcagcagcaaggcaacaaccaggtacgcctgcacggcgccaagggcttgccacctaccgaccagtacaaggtcagcgccacttacccggacggtttccgctgcaccgccagttgcctgattgccgggatcgacgcggtcgccaaggccgagcgggtcagccaggcgatcatcaacaagacctcggaactattcagccagcgcggctgggcgccttacaccgaagtgaacatcgaattgctcggcagcgaagccacctacggcgcccacgccaggcgccaggactgccgcgaagtggtggtgaaactggcggtgcgtcaccccaacaaacacgcactggtgctgttcgcccgtgagattgcccaagccgcgaccggcatggcgccgggcctgaccggcatcgtcggcggacggccgacggtgtacccgttgatccgactgttttcgttcctgatcgataaaacggcctgtgacctggccatcgacttccagggcgagcgccacccctgcgcactgccacctgccgacaccccgcgcctgcccgatgcgtccatcgatccgcccaagccccaaggtcgcgccgacgccagcgtgccattggtgaaactggccgtggcgcgctccggcgacaagggcaaccacagcaatatcggcgtgatcgcccgccatcccgactacctgccatggatcgccgaagcactcaccccgccagtgatcgtcgactggatgggccatgtgctcgaccctgtgcacggccgcgtcgagcgctggtatctgcccggcagccacagcctcaacttcctgctggaaaacgcgctgggcggcggtggcatcgccagcctgcgcatcgacccgcagggcaaagccttcgcccagcaactgctggatatcccgattgccgtgccgcaacacattgccgatcaactcgcataacaggagcgttgccgtggccttcgactcgatcttcaaagccaacctgttccaggggcaaaccgtgatagtcaccggtggtggcagcggcattggccgttgcactgcccatgaactggcggccctaggcgctcacgtgatcctggtgggacgcaaggcagacaaactgcagaacgtcgcgatagagattgccgaagacggcggcaacgccgattggcaggtgtgcgacatccgcgatgaagaggcggtcaaggcgctggtcaaacacatcctgcatgcgcacggtccgatccatggcctggtcaacaatgcgggcggtcagtacccctcgccactggccgcaatcaaccagaaaggcttcgaaaccgtactgcgcaccaacctggtcggcggtttcctggtggcgcgggaagtgttcaaccaatccatgagcaagcacggcggcgccatcgtcaacatgctcgccgacatgtggggcggcatgcccggcatgggccactcgggggcggcacggtcgggcatggacaacttcaccaagaccgccgcgttcgagtggggctatgccggcgtgcgggtcaacgccgtggcgccgggctggatcgcctccagcggcatggacacctacgaaggcgcgttcaaggcggtgattcccacgctgcgcgaacatgtgccgctcaagcgcatcggcaccgagtcggaagtcagcgcggccatcgtgttcctgctcagccccgccgctgcctttatcagcggcagcacactgcgcatcgacggcgccgccagcctgggcagccgcgcctggccgttgcacaaggcgcaggcgccgagcgaacccttcaacggcttccaccgcgcctacttgccggatgtgctcaaggcggagcaatagagcatgccagtgattgaatccctgatcgacgcccacagcgcccaattcgcgcaaaaccgcgaagccatgctggccgccatcgcccaactgcgtcaactggaagacaccctgctgagcaaggcgcaggacgccaagcccaagttcgacaagcgcggccaactgctgccccgcgaacgcctcaacctgctgctggacccgggtgcgccgttcctcgaactggccagcctggccggctacaagctgcacgacgacaaggacggcagcgccgccggtggtgggttgatcgccggcatcggctacgtcagcggcgtgcgcatgctggtggtggccaataacagcgcgatcaagggcggcaccatttcccccaccggcctgaagaaatccctgcgcctgcaacaaatcgccatggagaacaaactgccagtggtgaccctcgccgaaagcggcggtgcaaacctcaactatgctgccgagatcttcgtcgaaggtgcgcgcagcttcgccaaccaggcgcgcatgtcggccatgggcctgccgcagatcaccgtggtgcatggctcggccacggccggcggcgcgtatcaaccggggttgtcggattacgtggtggtggtgcgcggccgcgccaaactgttcctcgccggcccgccgttgctcaaggccgcgaccggcgaagtggcgaccgatgaagaactgggcggtgccgagatgcacgcacaaaccgccggcaccgccgaatacctggcggaaaacgatgcggacggcgtgcgcatcgcgcgcgaaattgtcggcctgttgccctggaatgatcgcctgccacagacgccgaaacgtgcctacgcagaaccgctgtaccccatcgaagagctgctgggcctgatcccggacgacccgaaaaaaccctacgacgtccgcgaaatcctcgcgcgcctggccgacggctcgcacttcctcgagttcaagggcgagttcgacgcccacaccgtctgcggccacatgcacctccagggccgcgccgtcggcgtgatcggcaacaacggccctatcacaccgaagggggcgagcaaggccgcgcaatttatccaactgtgcgaccagagccgcacgccgctactgttcctgcacaacaccaccggcttcatggtgggcaccgagtcggagcagcaaggcgtgatcaagcacggcgcgaagatgatccaggcggtggccaatgcacgggtgcctaaactgaccattgtggtcggcggttcctacggtgccggtaactatgcgatgtgcggtcgcggcctggacccgcgctttatcttcgcctggcccaacagccgcacggcggtgatgggcggtgcccaggccggcaaggtgctgcgcatcgtgacagaggccaagcaattgaaggacggcctggtgccggaccccaaggtgctggacatgctggaacaggtcactgcgcagaagctcgacagccagtccaccgcgctgtatggcagcgcgaacctgtgggacgacgggctgattgaccctcgggatacacggaccttgctcggttttctgctggatatttgtcatgaggctgaggtgcggccattgcagcccaacagctttggtgtggcgcgcttctaatcaggagaacaataaaaatgatcttcacccaagaacaccaggaactgcgccgcagcgtccgcgccttcgtcgaccgcgagatcaacccccatgtggacgaatgggaaaaggccgggcgctttcccatccacgatattttccgcaaggccggtgaactcggcctgctgggcatctccaaaccggagaagttcggcggcatgggcctggactacagctactccattgtcgccgccgaagagttcggcaccgtccgttgcggcggcattcccatgtccatcggcgtgcagaccgacatgtgcacaccggccctcgcccgcttcggctccgatgcactgcgcgaagaattcctgcgtccggccatcagcggcgagcaggtcggctgcatcggcgtctcggaaaccgccgccggttccgacgtggccgggttgaagacccatgcgcgcaaggacggcaacgactacgtgatcaacggcagcaagatgtggatcaccaactcgcccagcgccgacttcatctgcctgctggccaacacctccgatgacaagccgcacatcaacaagtcgctgatcatggtgccgatgaacacccccggcatcagcgtcagcccgcccctggaaaagctcggcatgcacagctccgagaccgcccaggtgtttttcgacggcgtgcgcgtgccgcaacgcaaccgcatcggccacgaaggtgcggggttcatgatgcagatgctgcaattccaggaagaacgcctgtttggcgcggccaatatgatcaagggcctggagcattgcatcgacagcaccatcgagtactgcaaggagcgccagacctttggcaaggcgctgatcgacaatcaggtcattcactttcgcctggccgaactctccaccgaaatcgaatgcctgcgtgcgctggtctaccaggccaccgagcagtacatcaaaggccaggacgtgacgcgcctggcgtccatggccaagctcaaggcggggcgcctgggccgcgaagtcagcgacagttgcctgcaatactggggcggcatgggcttcatgtgggacaaccctgtggcccgcgcctatcgcgatgtgcggctggtgtcgatcggcggcggcgccgatgaaatcatgctgggcatcatctgcaagttgatgggcaccttgccggggaaaaaaccatgaacaccttgttgctcgaaccccacaacggcgtgctgcacatcaccctcaaccggcccgactgccgcaatgcgatgagcctggagatggtcaatgaactgcgcgcggtgttggcgcagttggatgtccagacgcgcgcggtagtgatcagcggcgccggcggacatttctgcgccggggcggatgtgaaggacctagtcacggcgggcaatcaactgcaggcgctgaaccgggcgtttggcacgttgctgcaagaagtcgaagcgctgtcgcaagtggtgatcgtcgtgctgcaaggcgcggtgctgggcggtgggtttgggttggcgtgcgtgagcgatatcgccatcgccgatcaccaggcgcaattcggcttgccggagaccagcctgggcttgctgcccgcgcagattgcaccgtttgtggtcaagcgcatcgggctgacccaggcacggcggctggcgctgacggcggcacggtttgatgggcttgaagctgagcggctgggggtggtgcactttaccgagcgcgacccgcaggcgttggcgcagcggttggatgacgtgctggggcaagtgctgaagtgtgcgccgggggcgaatgggcgtactaaagcgctgttgctggccagtgtggatgaaccgctggaggcggtgctggatcggggcgcgcagtggtttgccgaggcggtgcgcagtgaggaagggattgaggggacgcaggcgtttgtacagaaaagaaagcctcggtggtgcaaatgacgccatcgggggcaagccccctcccacactgtgggagggggcttgcccccgatgaggcccgtaccgtcactatcaatccacc

SEQ ID NO: 89 - DNA, 32055 bp, Pseudomonas nodulensis
gggcaagccccctcccacactgtgggagggggcttgcccccgatgaggcccgatcagacaccccatcagccaagggataaacccatgcccgccttcaacaaaatcctgatcgccaaccgcggcgaaatcgcctgccgcatccagcgcaccgcccaagccctgggctaccgcaccgtcgccgtctacagcgatgccgacgcccaagccctgcatgtgcagatcgccgatgaagccgtccatatcggcgcggcccccgtgcaacagtcgtacctcaatatcgaggcgatcctcgccgccgccagactcaccggcgccgatgcgatccaccccggctacggcttcctctcggaaaaccccgacttcgcccgagcctgccaacacgccggcctgaccttcatcggccccagcgtcgaggccatcgaactgatgggcagcaaacgcctgtccaaactcgccatgcttgacgccggcgtgccgtgcattgccggctaccagggcagcgcccaggacgacgccaccctgcaacaggaagccgggcgcatcggctacccgttgatgatcaaggccagcgccggtggcggcggacgtggcatgcgcctggtgcaccagccagaagcgctgctggacaacctgcataccgcccgttcggaagcgaaaaatgcgtttggcagcgacgaactgatcctcgaacaagcgctggtcgagccgcgccacgttgagatccagttgttcggcgacagccacggtcagctgatctacctcggcgaacgcgactgctcggtccagcgccgccaccagaaagtcatcgaagaggccccctgccccatcatgacggccgagttgcgccaggccatgggtgaagccgcattgaaggccgggcgcgcggtgaattacgtcggcgccggcaccgtggagttcctgctcgaccgtagcggccgcttctacttcctggaaatgaacacccgcctgcaggtggaacacccggtgaccgagttgatcaccggcctcgacctggtggattggcagttgcagatcgccgcagggcaaccgctgccgttgacccagtcggaggtgaccctgagcggccatgccatggaagtgcgcctgtacgccgaagacccaacccagggctttctgccgcaaaccggcgaggtactgcgctgggaaccggcggccggcgtgcgcatcgaccatggcgtggtgcagggccaacgtatcagcccgttctacgacccgatgctgggcaagctcatcgcccacggcgccacccgtgaagaagcgcggcgcaaactgctgcgggcggtggaagacacgctgttgctgggcgtcgcaaccaatcagcaactgctggctgacctgctcaagcacccggactttatcaacgacgatttcagcaccgggtttatcgccgagcacttcagcgagataccgcgtccttctgtgtcgagcgaacagctcgccctggccgctgcactgttctacacccacagtgccgagcaacatccccacggtctgtcgggctggcgcaacaacgccagtagcccttgcacctaccgccttgaggtcaacggtgaaatccacaccgtcagtaccgaacccctgctgctcagcgccgacggtcgccacgccaccctgatgctcaacggcatccgtcgacgcatggcctatcatctcgaaggcgaccaactgtggctacccggcctgtgcgtgaccaaccgcacccagcaagtggccagccgccaggccgatgccagcagcggcacggtcaaggcgccgatggacggcgccatcgttgatgtgcgggtcagcgccggtgatagcgtcaccaagggccaactgctgctggtgctcgaagccatgaaaatggagcatccgctgaccgccggcatcgacggcgtgatcaagggcgtgcaggtgattgccggtgaccaggtgcgcaatcgccaggttttactcgagatcatctagccccctaggcggaactacagggccgggctacgctctatccccaacagaaagggaagagtacgggaacctgcgcgatgcctcattggctgattattgaccttgaagccacaacggatgaaggcggctggcccgtgacggagatggaagtcatcgagatcggcgcaagcctggtcaaccgccagggccgcgagctggatcacttccagcgctttgtgcggccgctgcgccgccccttgctgacgcctttttgccggcagttgacccacatcacccaggcgaacattgatggcgcagtgccaatcactgaggtgtggccgttgttcgagcgctggctgggccagcaccaggcgcgcctggagggttgggccagttggggtgactacgatcgcaggcaactggagctggagtggcagcgccatggcctggccagcgccctcgccaccacgccccatgtgaacctcaagcagcgcttcgccaaggcccgtcgcctggacaagcccctggggctcaacggcgccctgcaattggcaggaatgcagttccacggccagcaacaccgggcgttggaggatgcgcgcaacacggcgcgcctgctgccattgattttgccggtctaggcagcttccctggccttgggcatactggccgacctttccagacccttttccgaggaatcgcccatgttcaaagtcaacgagtacttcgacggcaccgtcaagtcgatcgctttcggcaccgcagaaggtccggcgaccatcggcgtcatggctcccggcgaatacgaattcggcaccgcccagcgtgaaatcatgcacgtggtgtccggcgccctgaccgtcaagctgcctgacgccagcgactgggaaaccttcgccgccggcagccagttcaacgtgccggccaacagcaagttccaactcaaggtcgccgtggacaccgcttacctgtgcgaataccgcggttaagggtttcccggaaacaaaaaaatgcccgtctcctgcgagacgggcattttttatgggcttggaaagctattcgagaatggtcaccggcatgccgacttccaggcggccgatgctatcgttgaccaggttctggccgaagatcgcgccattttcagtcttgcgataggtttccagcgtggcgaagggttcacggtcagcactgcgttcgccggtctgcgggtcgatggtggtgaggatgcagcgcgagcagggctttaccgcacggaactccacatcaccgatacgcaggcgtttccagccatcttcggcgaaggcggtgctgccttcgatcaccaggttgggtcgaaaacgcagcatctccatgggccggccgatgcgttgcgaaaggtcatccagcgaagcctggccaatcaccagcagcgggtagccatcggcaaacgcgacctggtcatcgtccttgccataaccggcctcggtggtgcgggcgcgttcgagggggatctgcaccagccgcgtcggcttgccgataaagtcactgacccaggccgctgcctcgtcgcctgcgtccggcacccgcaaggtgtcgcgccagatggtcacaccgcgcaactcggcattaccgcccggcagtgcgacatccagcggcgtgtaaccgggcgaactcaaggtgagcccaccgttgcggttccacagtgccgacagttgactcatcttggccacggcgcgctgcgtgaggaagcgcccgctggcttcgtccaccagcatccagcgtcgatccccatccaccccgagcttatccaggccgacctgttgcaggatttcggccttgccggacttcaaggggtaacggtacaacgcgctgagacgaagcatgagcctgcattcctgaggggcaaagccatcaccctaaggtcatgcgggcacttcgtccagcatcagacgctggcgcaccacgtccaccagcttgtcgggctggaatttggacaggaaattgtcgcagccgaccttcttcaccatcgagtcgttgaagctgcctgacagcgaggtgtgcaacaccacgtaaaggctgcgcaggcgcggatcgttgcggatctcggtggtgagacggtaaccgtccatctcgggcatttcggcgtcggtgaaaatcatcagcagtttgtcggtcatcacatggccggcgtcggcccaggccttgagcatgttcaacgccttgaggccgtcactggcgatgtgcatcttcacgcccagttggccaagggtgtcgcgcagttgcgagagggccacgttggagtcatccaccagcagcacttcgcggccgcgggcgcgctccagcaccgggtcttcgagtttctcgcgggaaaccttggcgttgtacggcacgatctcggccaggactttttctacgtcgatgatttccaccaactggtcgtcgaccttgctgatggcggtgaggtaatgctggcgcccggcactggtcggtggcggcaggatggcctcccagttcatgttgacgatgcggtccacaccgcccaccaggaaggcctgcaccgagcggttgtactcagtcacgatgatggtgctgttggggccaggcaccagcgggcgcatgccgatggcctgggacaggtcgatcaccggcagggtctggccacgcaggttgaccacaccgcacacgaaaggatgacgctggggcatcagggtcaacttgggcagttgcagcacttcctgcaccttgaacacgttgatggcgaacaattggcgccccgccaggcggaacatgaggatctccaggcgattctcacccaccagttgcgtgcgttgatctaccgtgtcgagaatgccggccattaaaagctcctgatgcgctgaggaatttgtgcggttcacataaggtgagttatcggcggcgaacgccagaccttgacccccgtaaaatgccacgtaaatccattgatgtcacactgacatcatgctttactgcgctggcctctccgtatggcaagaaagcgacgttgcgcgacattcaattcgacgcaaggttccgctatgtaagggattcccctacgcacaatcaggcccaacctgatattcgcaatatctaatagccattaatgtgacgccattctcaatgcatgaatggagtcaggcttttgtttgccatcccaagccctcggcccacgggccttccagacatacagatgtcggcaatcgaaggtgtgcaattgacccctttcatgagggcagcgcacagccgttgccgtcactctaataaacgtcctactgaaaactcagaagccgcctacaggtcccagtcatatttcggcgctatttttaagccattcacccagtgcgacatctcatcacccgaccttatgttgtggagacttgtatgatgaacagcgcaaatgaatggcaaaccacactccccgagttcctgcttgaagcagaaacgctgctggccaagtcggaagagtgcttgagccacctgcacctgattcgcgacgacagcgacgccatcgactgcatgaagtccagcctggccaaactggccgaaaaggccgacagcctggccctgcaggtgatcagcgagttttcccggcatatccaatacctgatcgccaatgcggcaagcccgatgcaactgcatgaccaggcgctggatgcactgcatgcgtgcctgacgctactcgcgtggcaactggaactgatcgatgtgcgtaccggcgaactgagtatggacgagagtgagcaggcgacattgattgcaaccgtcacgctgcagatcccgcagaaggatttcacttataaaccgcagcagcgtgtgcaccacgcctcttgagtggataacaagtcgtattcgaacccgaagttatctaaaaacgacacgactattaactcgttggacttgaacagcgcagacaaagatatcaattagccattaacggtaataacgatacaaccaaacagaaataatataacttccccactccatgaactctgggaataccgcccggagcatttgcgcggtcaataatccggtgaggcacggcaccaggcgaccaacggtaacagtggtggtactatgccccgctcgaagtgactcaacttcatcatgcataaaaacgattcgataacgcattccaaacagagccccgtcagccgcagtgaccggacttcccgcagcgcaccctcattggctccatccgctatgtacgccagcctcaagacactcatcgcaaggtccgcgtcccgcagcaatgcacgccgtttgatcctcgccctgtgtcttggctcgctgctgctgagcctctggacctattccagctccgaaccgctgccgttgctggtgattgcgcttaacctggccactctcgtggtggtcggcctgcaacaatggcgttcacgcaagtccatcaagttccagccccaggaactggccgatcgcctgttgcaggtacaggaaaacgaacgtcaccgcctcagccgtgaactgcacgacgatatcggccaactgctcaccgccgccaagctgcaaagcgaatggctcaagcgtcgcctgcccgacgacctgcaagcccagtgctcggtgctgtgcaacaccctgaatgaaaccctggccaaggtgcgtgacgtttccgccatcctcaaccctcgccagttggccagcctgggcctggaagccagcctgcgtgcacacctgctcaagaccctggaaaacactccgatccactggagcctggaatgccagcaacggctgaccggaatcccggaagaaatggcagtggcggccttccgcatcacccaggaagcggtgaccaacatgctgcgccacgcccaggcgcgcaacctgctggtacgcctgcaacgcttgcccgaaggcctgtcgctgaccatctgcgatgacggccagggtttctcaccgtccatcaatcccggcctggaaggccaacggggcatggccggcatgtccgagcggatagatcagcttggcggtacgttgtccgtcagcagccagcccggcaatgggacacggatcgaagcgcttttcccctgggcgcctcgcgccctcgaacgggccagttcccctaaggttctcgagtgagctgcaaattactcctggtagatgaccatgcactgatccgggccggcgtacgcgcgctggtccaggatattcccggctacacggtgatcggcgaagccagcgatggcgcgcagttgctggagcagttcagcgccctgctgccggatatcgtgctactggacctgtcgatgaagcacaccggcggcctggacgccttgcagcaactcaagcgcgcctaccccaagagcaaagtgctgatcctgtcgatgcacaccgacccggaactgatcatgtgtgcgctggagtccggcgcccatggctacctgctcaaggacaccaccgccaacgagctggaacacgcgctgctggccttgcgcaacaacgagcgctacctgagcccggcgatcgcccacaccgtgatcaaccaggcgctggtgcgcagccaggggccgaccactcccgccggccacagccacaacctcacggcgcggcagttggagatcctgcgcctgatcgtgcgcggcaagtccacccgggagatcgcccatgggctgggcctgagcatcaagactgtggaagcccaccgctcgcagatcatgaagcgcctgcagattttcgacgtggcgggcctggtgctattcgcggtgcgcgagcagatcatcagcctggacgactagcggcgaatccaccggcaagtgtacgcgcaaggccttgggcaaggcctcgaagtgcagatcatcgccctccagcggctcgccatccaggttgatgtacaagccctgtgcgaccttgatattcacccacggcaggcgcgcccgcacaaacatggtgtccaggccccagccgttgctcatcaactcgcgcaaggtgccgaccacttcctggggggccggcaggatgctgacgtccagcaggccgtcgtcggccatggcgcctggacatagctcatgcccaccgcctgcctggcgaccgttgccgatacccagggcgagcagctcgcctttccaatggaaatcggggccatccagctcggcgtaggcggcctttaactcgctgaatcgcgtcaaaccggtgaacagataggcggcgccgcccaggacttttttcaaatcctcggaggtgttggcggtgacctggctgccgaaaccgccggtagccatgttgaggaagatctgcccgccgacctggccgaggtcgatggccctgggtggcacgtccagcagcgccagcgcctggtcaggctccaacggtacgccggcggccttggcgaaatcgttggcggtgcccaggggcatcagcaccaggctggcttcggtgttggcctgagccatggcttcggccacgtcgcgcagggtgccatcgccaccaccggcgatgatgtgggtgtagccgtcggccagggcttcgttgaccaggcgctgggcgtcgccaccttcccaggtgacccgtacggccaactccccaccctgctcgcgccgggcctgcacggctgaacgcacgtcctcgttgagggcttgcttgccgtggaggatcaacagggctttgggggtggtcattggggaatctcctgattcaaaggtgcttggagtatgtggaccttgggcggggagaaaaaagccattggatgggaaaaaaatcggatgattgagtacatatccgtttcttcggtaacggctgctatgggttccgctcttacagcggctcacttttgaacagcgcaaaagtaagcaaaacgctcttaccccaacactcggcacctcgcctaggctcggtgtgcccgtaattcgacagtgatttggggggccgccgccccgcgccatccatggcgcggggcggctaagatcaaaatcaaaagcaaagcgcggcggccgaatagccgaccgaatcgttgaagcgtacgcgctcccctgtaggagccgggcttgcccgcgaaggtcgttaaagatgacgcgggaaaccagaatgaacgcggcgcgctcactggttttagggctgcttcgcagcccaacgcggggcaagcccgctcaccacagtaaagcggttacacggaacaaaaaacgtatctgcgatgcgcagcgagtcgctcttgcttgtgatcttcggcgccccgtcaaacacgctggccgaacgcaggcttgaatccgtgggtaactcggcaggacgccgggttagccgcactgggccaaggatggcccattgcggcggcccacggattcaagccggagagagggcacaccgagcctacgcgaggtgccgagtgttggggcgaagcgtttttggttactttttgcgctcttcaaaaagtgacccgctgtaagagcggaacccatagcagccgttgccgcagaaatggatatgtacccaaaccccaatcaactcttatgcaacttactcatcaactgcgcctcagcctgcgtcaacccacacgactgcgtcagctcatccaccgtagcccccatccccaccagcttcgccgcctgcgcaaacgaaagactcgaaggatcgcgctgctcaatctgcgccagcttatccggcaacggcgcaagaatcgcacgcaactcatgcacctcgtccccgaccttcaccgcactctgctgaaagtgatcaacccgcttcaccaactccagcacccgccggtcacgcacagcatcacgctcagcctgctgtagcaacaactcgcgctgctgacgcacgtagcgcaacaggaatgccagggtcccggcccataacagggccaggacaatcaccgcggcctcaaggaacaatcagatgctctccagttccgaccactcttcttcgctcatcatcttgtccagctcaaccagaatcagcagctcgccgttcttgttgcacacgccctggatgaacttggcggattcttcgttacccacgttcggcgcggtttccacttccgattggcgcaggtagaccacttcggccacgctgtcgaccatgatcccgaccacttgcttgtcggcctcgatgatgacgatacgcgtgttgtcgttgacctcggtcggtaccaggccgaagcgctggcgggtgtcgatcaccgtcaccacgttgccgcgcaggttgatgatgcccagcacgtagctcggcgcacccggtaccggggcgatctcggtgtagcgcagcacttcctgcacgcgcatcacgttaatgccgtaggactcgttgtccagtttgaaggtcacccattgcaggatcggatcatccaaaccttgtgcggacgctgacttattcatacccctgaccccttcaagattggccacgcaccagcgtggaccttattgttcaatcaactgcgtttagtaaccggcatcgttttaaccgcgccactggcgatcaactcggccagttcggcgacgtcgagcaacgcgcacatgtgttcgatcacggtgcccgccagccaaggccgttggccccggtggctgcgccatttgatttcgttcgggtccaggcgcaacgagcggctgacttgatgcaccgccagcccccactcgtagccctgcaccgagatcacgtattgcaaaccctggcggaagtcgtcgcggtagcggtcgggcatgacccagcgcgcggtatccagcactttcaggttaccggcctggctcggcaggatgccgaggaaccactccggttgcccgaacagcggcgtcaattcctggccttccagggaatagatcgagcccaggcacaccagcggcaccgccagcgtcaagccggcgacgtcgaacaacaggcattcgaacggctcggcagcccagctcgggcgatcatcaccggtgaccggcggcggtgtgatgctcggcggcaggtgcacttccaccaccggctcgaccaccacgggggcaatcaccaccggagcaatcggcacgacgacaggcacaacctgcgcatcgcgggcctgttcttccaggacggccagctggaattcatccagcgtgctttccggttctacaacggcaggctccaataccaggatcggttccggcagcgcttcctcggtcgcgtcctgcagcagggcatccaggtaggattccagcgccagttgcggccgggtcttgagttcgacgggacggttcatcacgccacctgcgccacaagctgctgcgacagcaggtgtttgagcaacgcgcggtaggccagtacgccacggcttttcgcgtcgaactgcgacggcgccaggccggcgcggctggcgtcacgcaggcgcgtgtccaccgggatatagccgttccagatggtgtccgggtaggcatcgcgcaatacgcgcagggtgccgagggacgcctgggtgcggcggtcgaacaaggtcggcacgatgctgaacggcagcgcctgtttgcgcgagcggttgatcatcgccagggtgctgaccatgcgctccaggcctttgacggccaagtgctcggtctgcaccgggatcaccagttgctggctggccgccaaggcgttgaccatcagcacgccaagcaacggagggctgtcgatgatcgcgtagtcgaagtcctgccacagttgcgccagggtcttggcgatcaccaggcccaggccgctctgccccggtgactggcgctccagggtcgccagcgcggtgctggagggcagcagggaaatgctttcgttactggtgggcaacagcagttgcccgggcagatcggccggcacactgcccttgtgcaggaacagatcgtagttgctgtgttccagcgcatccgggtcgtagccgaaatagctggtcatggagccgtgagggtccaggtccaccacgaccacacgcttgcccgcctcggccagcaagccggctaaggcgatggaggtggtggtcttgccgactccacctttttgattggcaactgcccagactctcattcggttggttcctcccggcaggcacaggcgcgaccgagacattgcatggggttattgagccggcgacggagaattgacggcactctgtcgaaccggcggttttaccggggccggtgcagtttgtgtgccagcccgcttcaaggccgcatccggtgttgcattagcggtgccggtgccggtcaggctgcggcgcacatccaggttgcgcgacaccaccagcaccacccgacggttacgcgcgcggccttccgccgtggcgttattggccaccggctggaactcgccgtagcccacggacgccaggcgaccagggttaacgccctgcatcgcgagcatgcgcacgatgcttgaagcgcgggccgaggacagctcccagttggtcgggtactgcgcggtgctgatcgggaaattgtcggtgaagccttcgacatggatcgggttttcaaatggcttgaggatcgccgccaccttgtcgatgatggtgaacgcctggtcactgggcaacgcatcggcactggcgaacagcaggctggaattgagttcgatctccacccacagctcattaccgcgcaccgtcatctggttggagctgatcaggtcgccaaacgccgcgctgatgtcgtcggcgatgcttttcagcgggtcgctggtgccgcccacgccggcagcggtttcatcgctgtcgttgaccagcggcttggccggggtcacggtcttgggcctctcttcaccgatgggaatcggcttgagcgcacggtcggcgtcgttgaacacgccgatcagcgcctgggaaatgactttgtacttgccttcgttgatcgacgagatggagtacatcaccacgaaaaacgcgaacagcagggtgatgaagtctgcataggacaccagccaccgctcgtggttgacgtgttcttcaggctcgcgacggcgacggctcacaatacatacctcccatcaatccatgaagccctggagcttcaattcgatggaacgcgggttctcgccctcagcgatcgacaggatgccttcgagcagcatctcgcgataacgcgactggcgcatggcaatcgacttgagtttgctcgccaccggcagcagcaccaggttggcactggccacgccgtagatggtcgcgacaaacgccacggcaatgccgctgcccagttgcgatggatcggcgaggttgcccatcacgtggatcaggcccatcaccgcaccgatgatgccgatggtcggcgcgtagccgcccatgctttcgtagactttggcggcgttgatgtcgcggctttcctgggtgtagaaatccacttccaggatgctgcggatcgcttccggctcggcgccgtccaccagcaattgcaagcctttgcgtgcgtagctgtcgggctcggcatcggccacgccttccaggcccagcaggccttccttgcgcgcggtgaggctccagttgaccacgcggtcgatgccgccgggcaggtccacgcgtggcgggaaaatgatccatatcagaatctgcatggcgcgcttgaacgagctcatgggcgattgcaacaacgccgcgcccacggtgccgccgatcacgatcagcgccgccgggccgttggccaacgcaccgaggtgcccgccttcgaggtagttgccgccgatgatcgcgacaaacgccatgatgatgccgatcaggctcagtacatccatcagaggcaggcctccaccagatgcttgccgatgtcgtccaggctgtagacggcgtcggccaggtccgccttgacgatggccatgggcatgccatagatcacgcagctggcttcgtcctgggcccagatggcgctgccgccctgcttgagcaggcgcgcaccttcacggccgtcggcgcccatgccggtgagcactaccgccagaactttgtcaccgtaggacttggctgccgaaccgaaggtgatatccacgcacggcttgtagttgaggcgctcatcgcccggcaggattttgatcgcgccacggccgtcgaccatcatctgcttgccaccgggggccagcagcgccaggccagggcgcaggatgtcgccatcctcggcttccttgacgctgatgcggcacagcttgtccaggcgctcggcgaaggccttggtaaacgccgccggcatgtgctggatcaatacgatcggcgccgggaagttggctggcagttgggtcaacacgcgttgcagcgcaaccgggccacccgtggaggtgccgatggcgaccagcttgtaggccttgcgcttgggtgcgggcgaatgagccgacgccgcaggtgccagcgtgcgagcgggtgccactgcaggccgtgtcactggcgcaggcgcagggcgcgcaaacgacgacgtcggtgcagcgggagccggtgctggcgcagcggttggagtaggcgtgctgaacaggctgcgacggttactgcgcgaaatgctgtgcaccttctcgcacagcatctgcttgaccttctcggggttgcgcgagatgtcttcgaaattcttcggcaggaagtccaccgcaccggcgtccagcgcatccagggtgacccgggcgccttcgtgcgtcagcgaggaaaacatcaggaccggggtcgggcagcgttgcatgatgtgccggactgccgtgatgccatccatcatcggcatctcgtagtccatggtgatcacgtccggtttcaacgcaatggcttgatcaatcgcctctttgccgttggtggccgtgccgaccacctggatcgttggatcggcggaaagaatttccgagacgcggcggcggaagaaacccgaatcgtccaccaccaggaccttgactgccataaacactccgttaggcggggcgggcactaccgccctgccccaccagaatcaaatacgccgagcggcgtaacgcttgagcatgctcggaacatcgagaatcagcgcgatccgaccgtcaccggtgatggtcgcacccgacatgcccggggttccctgcagcattttgcccaaaggcttgatgaccacttcttcctggccaaccagttgatcgacgacaaagccgatgcgctgggtgcccacggacagaatcaccacatggccttcgcgctgctcttcatgggccgccgatgccaccagccagcgcttgaggtagaacaggggcaatgccttgtcgcgcacgatcaccacttcctggccgtccaccacgttggtgcgcgacaggtcgaggtggaagatttcgttgacgttgaccagcgggaaggcgaacgcctggttgcccagcatcaccatcagggtcggcatgatcgccagggtcaacggcaccttgatgacgatcttggagccctggcccttggtcgagtagatgttgatcgagccgttgagctggctgatcttggtcttcactacgtccatgccgacgccacggccggacacgtcggaaatctcggtcttggtcgagaagcccggggcgaagatcaggttgtagcattcggtgtcggtcaggcggtcggcggcgtccttgtccatcacgccgcgcttgaccgcaatgttgcgcaatatggtcgggtccatgcctttgccgtcgtcagtgatcgacagcaggatgtgatcgccttcttgctccgccgccaggatcaccttgccgccacgggacttgcccgaggcttcgcgctcttccggggtttccacgccgtggtcgacggcgttgcgcaccaagtggaccagcgggtcggccagggcctcgaccaggttcttgtcgaggtcggtttcttcgcccaccagttccaggttgatttctttcttcagctgacgcgccaggtcgcgaaccaggcgcgggaaacggccaaagactttcttgatcggctgcatccgcgttttcatcacggcggtctgcaggtcggcggtgaccacgtcgaggttcgacacagccttttgcatggcttcatcgccgctgctcaggcccaggcgcaccaggcggttacgcaccagtaccagttcgccgaccatgttcatgatgtcgtccaggcgcgcggtatcaacccgcacggtggtttcggcttcactggcaggcttctcggctgtcggcgcggcggcggcacgtgccggagcaggtgcggcggccggggccggtgctggcttggcagccggtgcaggtttggcggccggcgctggcgcagcggccttggcggcgaccggtgcagcggtcgccaccgctgcggccggggccacttcgctgaacttgcccttgccgtgcaactcgtccagcagggattcgaactcgtgatcggagatcagcccatcgcccgcaggggcggcgctggcagcagccggtgccgcagccgtggcggcgacttccggcaaggcgtcggccgcgaaggtgcccttgccatgcagttggtcgagcaatgcttcgaattcatcgtcggtaatgtcggtgctggcgctggccgccggtgcatccgcaggagcagcagcaggtgccacggcgtcggccgcgaactggcccttgccatgcaactggtcgagcagcgattcgaactcggcgtcggtgatgtcttcgctggtcggtgcggcgaccggggcagccggcgcttccgcctcggccttgacggcactgagggagttgagcagctgttcgaactcgctgtcggtcacatccggctcggcctcaaccacaggctccggtgcggcttcaaccaccggtgcggccgacgtgtcggcaggttccgccaggcgcgccagggcggccagcagttccggagtggccgccgtgatcggtgcacggtcgcgcacctcgctgaacatgccgttgaccgcatccagtgcttcgagaatcacgtccatcaactccgaatcaacgtgacgctcacccttgcgcaggatgtcgaacacgttctcggcgatgtggcagcactccaccagctcatggagctggaggaagccggcgcccccttttacagtgtgaaaaccgcgaaaaattgcattgagcaggttcgcatcatccggtcggctttccagctcgaccagttgctcggacaactgctctaaaatttcgccggcctctacaaggaaatcctgaaggatttcttcatcggcgccgaagctcatgtgggtgctccttagaagcctaaactggataacaggtcatcgacatcatcttgacccgatacaacgtcttcacgtttatcggcatgaatctgcggaccttcacccttggcgagatgtttttgtggatctttttccgagaggatcgcttcgcggtcatgttcgatgccggcgaaacggtcaacctggccagccataagcaccaatttgagcaagttgctttccacttcggtgaccaactgggtcacacgcttgatcacctgaccggtgaggtcctggtaatcctgggccagcagaatgtcattgaggttgctggaaaccgtgcggttttcctgctcgctgcgtgacaggaaaccgtcaacccgacgtgccaactcgcgaaactcctcagcccccacttcccggcgcatgaagcggccccagtcgtggctcagggcctgggcttcagtggccatgccgttgaccagaggcgtggcgttttccaccaggtccatggtgcggttggccgccgcctcagtcagcctgaccacataggacaggcgttcggtggcatcggtgatttgcgagatttcttcggcctggggcatatgcgggtcaatctggaaattgacgatcgcactgtgcagctcgcgtgtgagcttgcccacttcctgatacaggccgcggtcacgggtctggttgagctcatggatcaactgcaccgcgtcgccgaactggcctttttcaaggctgtcgaccaactggtgagcatgctttttcagggtcgactcgaagtctccctgtgacgtttctttatgctccatagctcccccgcgatggcattagccgtggatgcgttcgaagattttttcgatcttctctttcaaggccagtgcagtgaatggcttgaccacgtaaccgttgaccccggcctgggcggcttcgatgatctgctcacgcttggcttcggcggtcaccatcagcacaggcaggctgcgcagcttttcgtcagcgcgcacgtggcgcagcaagtcgataccggtcatgcccggcatgttccagtctgttaccagaaagtcgatgctcccgctgttgaggatcggaatcgccgtaatgccgtcgtccgcctcgaccgtgtttgtgaacccaaggtcacgcaacaggttttttatgatccgccgcatcgttgagaagtcatcaacgatgaggattttcatgttcttgtccaattcgacctccaagcagtcttaaacgcgcccagcacctggacgcgccatttcaatcaacaggcattacacaaaaaggactgccgggggcaccacgggtcgaacccgcgaaggccggttgccctcgcggtatcgtctgcagtgtccccacactgcctgttcagcgcgctcgccactctcccaagcgcccccgcaagcgggctgcgcactggctgtgcaactggctgacccgcgattcgctgacacccaggacctcaccgatttccttgaggttcagctcttcgtcgtagtacagcgccaacaccagccgctcacgctccggcaaattggcaatcgcgtccgccaacgccccctggaaacgctcatcttccaggtctcgcgatggctccatatgagcactcgcgccgtcctcgtgcagcccttcatgttcgccgtcctgcaacaggtcgtcgaaactgaacaatcggctgcccaaggtatcgttcaaaatcccgtagtaatcgtcgagactcaattggagttcggccgcaacttcgtgatctttagcgtcgcgaccggtttttgcttcaattgcgcgaattgcgtcactgaccatgcgtgtattgcggtgtaccgaacgcggcgcccagtcacccttgcgcacttcatcgagcatcgcgccacggatgcggatgcccgcatacgtctcgaaacttgcacccttgctcgcgtcgtatttggtcgacacttcgagcaagccgatcatgcccgcctggatcaggtcttcgacctggacgctggcgggcaggcgcgccagcaagtgataggcaatgcgcttgaccaggggcgcgtagcgctcgatcaactcgccctggctgtcacgggcagacttcttgtacgcgttgtagccggtcgctgtcatagcacgggtcctgcgctcgtctgatgcaccaatcgctcgacgaaaaactccagatgcccccgggggttggcgggcaatggccaggtatcgaccttctgggcaatagccttgaacgccagtgcgcacttggaacgagggaacgcttcgtagactgcacgctgcttttgcacagccttgcgcacacactcgtcgtagggaactgcgccgacgtattgtaaggcgacatcgaggaaacgatccgtgaccttggtcaacttggcgaacaggttgcgcccttcctgcgggctctgggccatgttggccaggacgcggaagcggttcatgccgtagtcgcggttaagcagtttgatcagggcgtaggcgtcggtgatcgaggtgggttcatcgcagaccaccagcaacacttcctgcgcagcgcgcacaaagctgaccacggactcgccgatcccggcggcggtgtcgatcaccagcacgtcgaggttgtcgccgatgtcactgaacgcctggatcagcccggcatgctgcgccgggctcaggtgcaccatgctctgggtgccggaggcggccggcacgatgcggatgcccccaggcccctgcagcagcacatcgcgcagctcacagcggccctcgatcacatcggcaagggtatgtttgggcgtcagccccagcagaacgtcgacgttcgccaaccccaggtcagcatccagcagcatgacgcgacggccaagctctgccagggccagggacaaattcactgacacgttagttttcccgacgccacctttgccgccggtcaccgcgatcacctgtacgggatgcatgctgcccattttatttctttaccttgtcttgcttagacgcaggctacatggcttggccgcgtgaatcgcttgcagaccatcgatgtagatacatttcacggtgttcataccgccctcaacctacccgcttcgccgggttgtggtagaggtcggcgaacatatcggccatcgcttcctcgctaggctcgtcttgcatttgcacgctgactgcacggctgaccaactgatgacggcgcggcagatgcagatcatccgggatccgcggcccgtcggtcaggtaggcgaccggcaattcatgactgatggccaggctcagcacctcgcccaggctcgcggtttcgtcgagcttggtgaggatgcaaccggccaggccgcagcgcttgtaactatgatacgcagcggtaagaacctgtttctggctggtggttgcaagcaccaggtaatttttcgacttgatgccacgcccggccaggctttccaactgcatgcgcaatgccgggtcgctggcttgcaggccggcggtgtcgatcagcaccacgcgcttgcgcagcagcgggtcgagggcgttggccagggactggcccgggtcgacatgggtcaccgacacattgagaatgcggcccagggtcttgagctgctcctgggcaccgatacggtagctgtccatgctcaccagcgcgatattctgcgcgccgtacttgagcacgtaacgcgccgccagcttggccagggtggtggtcttgcccatgccggcagggccgaccatggcgatcacaccgccctcttccaggggttcgatttcgggggtggcgatcatccgcgccaagtgggccagcaacatgcgccaggcctggcgaggctcttcgatttcggtggtcagggccagcaggtcgcgggacaacgggccggacaggccgatgcgttgcaggcgacgccacaggttggcctgttgcggtttgctgccttgcaattggttccaggccagcgaacccaactggacttcgagcagctcacgcaggccattgagttcaaagcgcatcgagtcgaacacacgctggtcaaccgccgctgccggggctggcgcagcgggacgcggcggctctttgaaggttggctcaaccaatggctccgcggcggtcagcggcaggccggcgaacaactggcgattggtggtggcatcgctgtcgccacgcatgctcagttcagcctgggccgaaacaatccgcgaagcggtcttgcgcagctcgtcttcgagctccatgttcggcacgcgcggcgccaaggccgaaggtgtgtaatccagggcagccgtcagctcgacaccgccggcaatacgacggttgccaataatcgcggcgtcggcgcccagctcatcacgaaccagtttcatggcctgacgcatatcggcggcgaaaaaacgcttcacttgcataacccactaccctcagccgttgggccctactgtcgcgacgatagtcacttgcttgttgtcaggaatttcctgataagccaaaacgtgcaaattcggtactgccaggcgcccaaaccgcgacaacatcgcccggaccgggcctgccaccagcaggatcaccggttggccttgcatttcctggcgttgcgcggcgtcgatcaacgaacgctgcagcttctcggccatgcttggctccagcagaacgccctcttcctggccttgtcctgccttctgaatactattgagcaatatttgttccaacctgggttccaaggtgatcacaggcagctcggagtcaagccctacaatgctttgcacgattgcgcgcgacaatccgacgcgcaccgaagccaccagggcggcagtatcttgactcttggcggcattgttggcgatagcctcggcaatgctgcgaatatcgcgcaccggcacctgttcggccagcagcgcctgcaacaccttgagcaactgcgacagcgacaggatgcccggcaccagctcttcggcgagttttggcgaggctttgccgagcaaacccatcaattgctggacttcttcgtggccgatcagctcgtgggagtgcttgtagaggatctggttgaggtgggtagcaaccacggtgctggcgtccaccaccgtgtaacccagggactgcgcctggctgcgctggctgatttcgatccacaccgcgtccaggccaaaagccggatctttggcggtaatgccgttgagactgccgaacacctgccccgggttgatcgccagttcgcggtccgggtagatctccgcttcggccaggatcacgcccatcagggtcaggcggtaggcgctgggcgccaggtccaggttgtcgcggatatgcacggtgggcatcaggaagcccaggtcctgggacagcttcttgcgcacgcccttgatccgcgcgagcaactggccgccctggttgcggtccaccagcggaatgaggcggtagccgacttccaggccgatcatgtcgatcggggtcacgtcatcccagcccagctccttggtttcctgggcgcgggccggggatggcagcagttcctgctggcgtgcaatctcctgctgggcctggaccttgaccgcattctgctttttccagaacaggtaggcaccgccggccgccatggccgccatgctcaggaaggacacatggggcatgcccggcacgatgcccatgatcgccatgatgcccgccgccacggccagggccttgggcgaggcaaacatctgccggctgatctgcttgcccatgtcttcggagcccgatgcacgggtcaccatgatcgccgctgctgtagataacaacagtgatggcaattgcgccactaaaccgtcaccgatggtcagcaaggcgtacaccttgcccgcatcgctgaaggtcatgccgtgctggaacatgccgaccgccacgccgccgatcaagttgatgaacagaatcagcaggccggcgatggcgtcaccgcgcacgaatttgctggcaccgtccatggaaccgtagaactcggcttcctgggccacttccaggcggcgtgacttggcttggttctggtcgatcaggccggcgttgaggtcggcgtcgatcgccatttgtttgccgggcatggcgtcgagggtaaaccgcgcgctcacctcggaaatccgcccggcgcccttggtcaccaccacgaagttgatgatcatcaggatcgcgaataccacgataccgaccacgtagttaccgccgatcaccacctcgccaaaggcctggatcaccttgccggcggcggcatggccgtcctggccgtgcagcatcaccacgcgggtggacgccacgttcagcgccaggcgcagcaaggtggcgaccagcaggatggtcgggaataccgcgaaatccagcggccgcagggcgtacacacagaccagcagcaccacgacggacagggcaatgttgaaggtaaagaacacgtccagcaggaacggcggcatcggcaacatcatcattgccagcatcaccagcaacaacaacggcacacccagattgccccgcgagaggtcagtcagggtgctgcgcgccgtgccgagcatttgagagcgatccaccagtattcctcgtgtcctttgaagcaaagttttgacgcggttgggcgtcctgaaggcggtattgcaagaagccttccaacttttgttttggaacgtcgatcgctatggacgcccacgttttttcggaaagaacacattttaaatgtgggagggggcttgcccccgattgcagcttgccagactaagagtcggtgactgacacaacgccatcgggggcaagccccctcccacacttggatgtgcgcgcagccggtactactggggaaatttctgacaaggttttgcggttgcccctaggaaactcgctctctagtctccgtacaccgctgcaaacgcagtggtcgggcgtcgcggcccggatttccaaagagcaaaagcactatcgcccgctttcagttgacgcttttttagcgtctactgtgcggcgctatggcggctgtgcgcgggataccttcgggtatgccgggttgctccttgaccggtccgcgaacctgcgcacagctgtcaccccatcgcgtcgcggcgatcagtggcagctccacttttaaggagcctcacaatgatcaaacccaccccaaatccccccatcagtctgtttaccgtcgtagacactctcaaaaccgaagacctgctggtcaacctcaccgaaaccctcgcctcggccgacgcgctgatgagtgattttgcgtttgaattggaagggccaaaacgcgaaggcgcgctgggtgttgcacagttgattgggctggcaaagctgcttgccgacagagtgctggaggacagcgagcgcttgatggcgtgatggcggatcgttcctgcactaccctgcgggaacgatcatcaagctcataggacgcggacgttctcggcctgagcgcctttggccccctgcgttacctcgaactctactttttggttctcttcaagcgtcctgaaaccgtcgcccgtgatggccgagaagtggacaaatatatcgcccccaccgtcttgagtgataaacccaaaccccttctccgcgttaaaccatttcaccgtacctgttgccattgccgttctcctgatatctcactcaaggacttgctggatgaccctgacctcggaggcatggacgccatcgggtcgatggatcatctgaaacgccacctgcacccccactgcaagccggacgccgcgcgaaccaatgaggtccactggaacggcctcgccgtccacgacaatcaaaccctttccagttgcctggtcataggatgtgacgatgcctctgataacccgattcaaaaccactctccctgcatctcatttacagcctgcgcgcagtgcatagggcaatagaaccgcgagcagcgcagtctggctactgtgaagtttgacaggtagacgccagttatcgacgagtggtagggagggcgacccggtgtcaggaatcgcggcgcaggtccggcggaatcggcagatccttgagcggatcgggccgcttgcccttgcccgcacggtactggcgaatctgatagacatacgccagcacctgggccacggctaggtacagcccggcggggatttcctggtcgaggtcggtggaatagaagatcgaccgcgccagctccggcgattccagcagcaggatgtcgttggccaccgcaatttcgcggatcttcaaggcggtaaagtcgctgcccttggccagcagcatcggcgcgccgcccttctccgggtcgtacttgagggccacggcgtagtgggtcgggttggtgatgaccacgtcggcgtcgggcaccgaggccatcatcttgcgctgggacatctcgcgctgcagttggcgaatacgctgcttgacctcggggcggccttcctggtccttgtgttcgtcgcgcacttcctgcttggtcatcagcagtttcttgtggctttcccacagctggatcggcgcatccaccgcggcaatgatgatcaacccggcggccatccacagtgcgctccaacccaccacctgcacgctgtggatgatcgccgactccagcggttcatgggcgattcgcagcaggtcgtcaatgtcggacgacaacaccatcagcgccacgaacaggatcaggatgaacttggccaacgccttgagcagctccaccagggccttggtggagaacatgcgcttgagcccggcgccagggttcatgcggctgaacttgggcgccatgctgccggcggcgaacagccagccgcccagggcgaccgggccgatcagtgcggcgagcagcaaggtgatcaggatcggctgcaccgccaggatcgcgatctggcccgaatgcaaaaggtaccggcccatggcgtcgggattgagcagcacctcgcggggcaaggtgaagttgtgtttcatcaactccatcaggtccagcgccaggccgccgccgtagatcagtaacgcgccggcgccggccatcatggtggcgacggtattgagctccttggagcgggcaatctcgcccttttccctggagtcctttttacgtttctccgtggggtcttctgttttgtcctgaccactctcgctctcggccatggctcagcgcgcccgtgccagatcacgtaagaactgcagggcgtcggtcgccagcggttgatactgattgagaatgtcggccaggccgatccagaaaatccccatgcccaacaccagggtcaacgggaaaccaatcgagaagatgttcagttgcggcgccgcacgggtcatcaccccaaacgcaatgttcaccaccagcaacgcggtgatcgccggcagcaccagcaacagcgaagcgcccaatacccagccgagccgtccgacgatctcccagaagtgattgaccaccagccccgaacccaccggcaaggtggtgaagctttcggtcatcacctcgaaggccaccagatggccgttcatggccaggaacagcaaggtcaccagcatggtcaggaattgcccgatcaccgccgccgacacaccgttggtagggtcgaccatggaggcgaagcccatgcccatctggatcgagatgatttgcccggcgatcacaaaggcctggaaaaacagcgtgagggaaaagcccatcagcgcgccgatcaggatctgctcggcgatcagcagaaaggcactgaggtcgatggcattgaccggcggcatcggcggtaacccaggcacgatcaccacggtaatcgccaccgcaaagtacaggcgtacgcggcgcggtacgagtgtggtgccgaacaccggcatggccatgagcatggccgtcacccggaacagcggcaggatgaaggacgccacccaggtgctgatctgggtgtcggtcaacgccagcaaggactgcatcgggtcagccgatcaactgcggaatactgccgtacaactgcaggatgtattccatgaaggtctgcaccagccacgggccggcgacgatcagggtgaccagcatcaccagcaggcgcggcaggaagctcaaggtctgttcgttgatctgggtcgccgcctggaacatcgccaccaacaggccgaccaacaggctcggcaccaccagcacggcgaccatcatggtggtcagccacagcgcttcacggaacaggtcgacggctacttctggcgtcatcgcgctataccccgccgaaactgccggccagggtgccgataatcagcgcccagccgtccaccagcacaaacagcatgatcttgaacggcaacgagatgatcagtggcgacagcatcatcatacccatggccatcagcacgctcgccaccaccaggtcgatgatcaggaacgggataaagatcatgaagccgatctggaacgcggtcttcaactcggacgtaacgaacgccggtaccaggatggtcaacggcgcctggtccggggtggcgatgtcggtgcgcttggacaagcgcatgaacagctcaaggtcactggagcgggtctgcgacagcatgaaatccttgatcgggccctgggccttgtcgatcgcgtcctgggcggtcattttctccgccaggtagggctgcagggcttgctggttcaccttgtcgaacaccggcgccatgatgaacagcgtcaggaacagggccatgccggtgaggatctggttcgacggcgtctgctgcaggcccagggcctggcgcaggatcgagaacacgatgatgatccgcgtgaagctggtcatcagcatgacgaacgccgggataaagctcagcgcggtcatgatcagcaggatctgcaggctgaccgaatactcctgcgcgcccgccgcgttggtgcccaacgtgatcgccgggatcgacaacgggtcggcgccgaacgccaatggcgcggccagcaacagcatgagcgtcaataaaacgcgcattacttcttatccttctgatccttgcccagcaactccatcaggcgctgggcgaattctggcgtggcggactgactctgatccacgctcaccggggtcttgagcacgtgcaacggggtgatgcggccaggagtgatgcccagcaggatctgctcctcgcccacctgcaccagcaccagccgatcacgcgggccgagggcgcgcgaaccgatcatctcgatcacctggccgttgcccggccctacccgctgcacgcggcgcatcagccaggccagcacgaatatcagcccgaccaccagcaacaggcccagcaccaactgggtcaattgcccgccgatgccactgctcaccaccggtgcggctaccgctgtcgcttgcgcggccggctcagccgcgagggcgctcaatggcagcgccagaaacagtcccgccatcgaatacttcatatcagcgcaacttcttgatgcgttcgctcgggctgatcacgtcggtcaggcggatgccgaacttttcgttgaccaccaccacttcgccgtgggcgatcagggtgccgttgaccagcacgtccagcggctcgccggccaggcggtcgagttcgatcaccgagccctggttgagttgcagcaggttgcggatgttgatttcagtgctgccgacttccatggaaatcgacactggaatgtcgaggatcacatccaggttcgggccatcgagggacaccggctcgttgtttttcggcacgctgccgaactcttccatgggcaggcggttgccggccggtgcggtggcggcgtcagcagccagcagcgcgtcgatatcgtcctggccaacatcgccggtttcttccagggcagccgcccattcgtcagccagggcctggtcttcggcggaagtgttttcgtgttcggtagccattacatgtcctcggcggagcaaacattcataaataggagtgaatcagcggcggttgatcggctcgaccacctgcagcgccaggttgcccttgtgggaaccgagcttgaccttgaatgacggcacgccgttggcgcgcatgatcatttcttccggcaattcgaccgggatgatgtcccccggctgcatgtgcaaaatatcgcgcaggcgcagctgacgacgggccacggtggcgctcagcggtacgtcgacgtccagcaggtcttcgcgcagggccttgacccagcgttcgtcctggtcgtccaggtcggactggaaaccggcgtcgagcatctcgcgcaccggttcgatcatcgagtacggcatggtcacgtgcaggtcgccgccaccgccatcgagttcgatgtggaacgtggacaccacaatggcttcgctggggccgacgatgttggccatcgccgggttcacttcggagttgatgtactcgaagttgacttccatgatcgcctgccaggcttccttcaaatcgatgaaggcctgctccagcaccatgcgcaccacccgcaactcggtgggggtgaactcccggccctcgatcttggcgtggcggccgtcgccgccgaagaagttgtccaccagcttgaacaccagcttggcgtcgaggatgaacagcgcggtgccgcgcagtggcttgatcttgaccaggttgaggctggtgggcacatacagcgagtgcacgtactcgccaaacttcatcacctgcacaccgcccaccgccacgtccgccgaacggcgcagcatgttgaacatgctgatgcgggtgtaacgggcgaaacgttcgttgatcatctccagggtcggcatgcgtccgcggacgatacgatcctggctggtgaggtcataacttttgacgctgccgggctcggcagccatttcggtctgtaccagaccatcgtcgacgccatgcaacagcgcatcgatttcatcctgggacagcaggtcttgcacggccatgtcgtgatcctactgcaatacgaagttagtgaagagcgcctgctcgaccacgactttgccgagctccttctgggccacttcctgcacgctggccgtaaccttctggcgcagcatttcctggcccaccggggtggcgagtgtgtcgaagctctggctggagaacagcatgacgaggttgttgcggatcacgggcatgtgcaccttgagggcgtccaggtccgcagcgttacgcgccagcaaggtgatgctcacctgcaagtagcgttgacgaccgttctgattgaagttggcgacaaaggccggaagcatcggttcgaagattgccggttgcttgacgttagtggcggtttcagcggcgggtgccggcttgctggcactgctgtgcatgatgtaccaagtgccgccgaccgaggcgccgatggccaggagcaggcccaggactatcaacaggataagcttgagcttgcctttgcctgcgggtgcttttgctgcgtcgtcgctcttcgccatgccaataatccgtcactattcggggattcatagatctacggaaaggcaagagcaagtgttatgccagagttgtctggtcatttgggaagagaggacaccaaaaatcaaatgtgggagggggcttgcccccgatagcggtgtatcagtcacccatgtttcagctgacacagcctcatgggggcaagccccctcccacatttcgtccggatcaggcgtagtagtcgaccgcactggagccgattacggttgaggtgaccggcgtcacggcttcagccacatcaaggtggttgccgctgtcgccattgtcaccaccgcgcccgccgctaccgctcacaccacgggtctgggcctgctgctgttgttgctcctgcccacgggactggtccgacacgttcacgtccacctggcccatgccctgctgggcaaacatctcccgcaagcgcccggactggctttccaacgcttcacgcactaccgggtgggcactcatgaagttgacctgggcctgttggtcggcggtcatgttgaccttgatatccaggcggccgagctcagcgggttgcaactggatctccgccgacttgaggttggcgctggacaggtacatcacccggttgacgatttcgtcggtccagccgctctggtgcatggccaatggtgcattggtcaccggtggcaaggcgttggcggttttcggcgtggccgcctgggtcaatgcggccaggcggttggcgaagtcatcgacacgggtgtcgctgctggcgttcttcaggtccttgagaccgtcttcgatcaacccgctgaaagccttgtcgccgccctggtcggtgctgtccttggtggcttgctggtcgaccatattggcgaggccagcggcgaaattctgcgcggcggtgggttgatcctgagtcggtgccggagcgctttttgcctgcgcctggctgctggccgatacgtgaccgccctgctccatcgccaggcgcacggctggcatggcatccaggggatcagcctccggatcgaacgcgggcttggcctcctcggtcgcggcgaccggcgccgcgaccactggctgggttttgtcatccttggcggtggtaacgggcgcgggtgtttcaaccggcaccggcacggctaccggggtgacggtggcaatcaatgccgggtcgaccaccgggtcggccggaggctgctgcaccagggtcgggtcggctggcgcgtcatcatccttgctggcgctgtcgtcggttttggccggcggcgtggcaggcaaggtattgccgctatcggcaacggctggcgtgctggcggcaggcttgtcattgcccgctgcaggcttggcgctggcatcggacgacttgcctgcggtgggtttggccgagctgtcgtcggtcttgaccgaaggtttggacgcctggttggcaaacacttgagcgaagccagggcccttgtcccgtgggtccgcagccgctgccggtgggttggcagagggcgcttgaggcttggccgcgggggcagcctgaaggagcgaattgggggcgactggcataggtaaaggtctccactgcatgggggtcggggatgcagtaactggaggtagagcaagagttgggccaggttttgggttttgtgtgtatatccattatttgggcaacggcggcttatggttccgcccttacggcggctcacttttgaaaagcgcaaaagtaagcaaaacgctcttgccccaacactcggcacctcgcccaggctcggtgtgcccgtaatccga

SEQ ID NO: 90 - DNA, 360103 bp, Pseudomonas nodulensis
  misc_feature (181656)..(181691): n is a, c, g, or t
  misc_feature (282429)..(282467): n is a, c, g, or t
caggctcatggtatctctcgtgtcccaaggcatgatgatttcccggcgaagtttatccgccgaaaagtgtccaccatgtccccgtacacccgtcaaccatgtgtccggtccatacaggcctttccaaaagtgacccgccgtaagggcggaaccataagccgccgttacataaaaaacggatatgtactcaatcaaacctgaaaccgctgccgctccgactcatacaacggcttcaccaacgcaaactcccgatcaatctgatcgaccagctcccccagatccccaaccgcagactcaaccgactcaacctccaaccgctgacacaactgcgccaaccgcactgccccaaggttcccactgctgcccttgaaactatgcgcaatccgccccaacgccttggcatcatccctggccttgcgcagcgcttcgacgcgtttttgggaatcatcgagaaaggtatcaagcagcttgggatactcgccttccatgacttcctgcaaacccgacaacacctccgggtccagatgtagatcaaccacttgctcgctccttgatcaagaatcggcggattatgccagagcctcccaggaaaactccacgcagacactgcgcccgccgtccgaccagcgtacatcgctgctcaattgacgcaccaggctcaagccccggcctgacagacggtcaatatcgagcggccgcgccagcatctgctccacgtcgaacccaggaccgctgtcctcgatgcgcagggtcatcctgccgccgacctcggtcggcagcacctgcacatgcacccgtatatagccgctgttgagttgtgccaggcggtcattacgcaggcggtaatactcggcaaacccttgggcgtcacgcttgagccgagaatccagacccagcacgccatgctccagcgcattggaatacagctccgccatcacgctgtacagcgccccgctctgctcccgcagaccatgaatctccagcagcagttgcagcaagtacggcaatgggttgtaacgcttcaacgtctcagcacgaaattcgaaactgactgaccaatccagcggacaagactggccactgtcggcatacaacggcccgctggcacgcagctgctggccggcgtgcagggtgatttccaccatgctcacgtcatcccgcgcttcgccccggaacgccgccagggcctgctcgatatcttcaaacagccgatccggctcacggttggcagcgaacacctgctgcaagcgttcagcgccgaacagctggtcattggcgtcagcggtatccagcacgccatcggacaacaggaacactcggtcacccaaggccatgggccagacttcggtgcgatcatcaaaagcttgcgccgacagcacccccaacggcaaatgccgcgattccagtggcgtacgcttgccggtggcgatttcatgcacgtagccttcgggcatgccgccgttccacacctccaccacccgccgctgggtgctcaggcacaacagggtggcgcagcagaacatgtccaccggcaggatgcgcttgagcttggcgttcatctcgcgcagggtctgcgccaggccgtagcccttggcggtcatgccgtagaacacttccgccaggggcatggcgcccaccgccgccggcaggccatgcccggtgaagtcgccgagcagcacatgcatgtcgccggacggggtgtaggcggccaacagcaaatcaccgttgaacaacgcatagggcgattgcaggtagcggatattcggcgcggcattgatacaaccggaatgggcaaccttgtcgaacaccgccttggccacccgctgctcatgcagcaggtagtcgtgatgcttggcaatcaggtcgcgctgctgcaaaaccgtcgcctgcaaccgacgcagacggtccatggcgttgatcttcgccgcgagaatcagctgattgtagggcttggctagaaagtcatcaccgccggcatccaggcactgagccagcgcttcgctctcgcgcagggacgtgaggaaaatcagcggcaccagctcctcacccgccaattgcttgatccggcgcgccgcctcaaagccgtccatcaccggcatcagcgcatccatcaacaccagctgcgggcgctcacgggtaaacaccgcgaccgcttcagcgccgttggtggccgtgagcacctggtggccctggcgccggataatggtcgacagcagcaacaggtcggcggcactgtcttcggcgatcaggattgtcagcggctcaaggaccggggccaggacgctcaactgatgtcgaacagtttgtcgaagttggagataccgaggatcttgcgcacatccgaattgctgttgatcacccggatatcggcgtcatcgccggcatggtcgcgcagcagcaagagcatgccgagggcggagctgtcgaggtaggtcgtctctttcaagtccacgatgtaagtgttgggcactttgtagaagcgctcataggcttcgcgaaacgtctggtggctgccgaaatcgaaccggcccttgactgcgatcgtcaacttcgtcccatccagggatacttctgactcgactgacatgtgactgcttccttgtcattggcaatgacacaaggtttagcaggtgccggggatgtgggcaactttcaatagacgtctttgcgcggcatgcgctgcgaaagctcatccagcaacttctgctcgcgcttgtcttcaagcgctcgcgcttcatcgatatagcgctgcaccagcttgcgcaaaccttcgacccgggcaaacgcggcttgccagctctcacgtgccttgtcgaggttgttctggtgccaggccaggctttggcgctgctggccgacggcggtttccaactggttgagaaagccctggtaacccatcagccattggccggacacgcccttgctgccgcgttcgatccattgttgctggtactcgccgcgaaagcgctccaggtcgcccagcttgctttccgccaagcggacttgcccctggaagtaacccaggcgctgcacggcggttttctcggctttttcggccatgtccaccaccggagccaggcgcgcggcgcggctgttggccatggcttagccgcctggcgccggggcgaagatcgactgcaggtgcgcttcgctttcgcccatgctgatcttgtcgttgagaccctggcgcaagtaggtgaccaattgcggttgcagggcaatcgccaagtcggtgtcgcgatcaccgcccgccacataggcgccgacgctgatcagatcgcggctctgctggtagcgcgaccacagctgcttgaactgttgtgcacgggccatgtgttccggcgtgaccacggccggcatcacccggctgatggacgcttcgatgtcgatggccgggtaatgcccttcttcggccaggcgccgtgacagcacgatgtggccgtcgagcacgccccgcgccgagtcggcaatcgggtcctgctggtcatcgccttcggacaatacggtgtagaacgcggtgatcgagccaccaccggcttcggcgttaccggcacgctccaccagcttgggcagcttggcgaataccgacggcgggtaacctttggtcgccggcggttcgccgatggccagggcgatttcccgctgggcctgggcgaaacgcgtgagcgaatccatcagcaacaggacattcttgcccttgtcgcggaaatattcggcgatgcgcgtgcagtacatggcggcgcgcaaccgcatcagcggcgcatcgtcagctggggaggcaaccaccaccgagcgcttgaggccttcttcaccgaggctgtgctcgatgaattccttcacctcgcggccccgctcgccgatcagcccgaccacgatgatgtcggcctcggtaaagcgcgtcatcatgcccagcaacaccgacttacccacgccggtaccggcgaacaggcccagacgctggccacggccgaccgtcaataatccgttgatgctgcgaatgcccacgtccagcggcacgctgatggggttgcggttgagcgggttgatggtggggccgtccatcggcacccagtcttcggccttcatgccgcccttgccgtccagcgcgcgaccggcgccgtcgagtacgcggccgagcatgctcatgcccatcggcaggcggccggtgtcggccaacggcaccacgcgggcgccgggggcaatgcccgccaggctgcccacgggcatcaggaaaatcttgctgccggaaaagcccatcacttcggcttcgacctgcaccgggtggtagctgtcgtcgttgatcaccatgcagcgactgcccatggcggcgcgcaggccttcggcttcgagggtcaggccgaccatgcgcagcaggcgcccttcgaggatcggctggccgggcaactccgtggcctcggcgtaaccacccaggcgcttggcgaagctggtgcggtcaaggcgcatcgacggcgtccaggtctacgctcagatcaggctcggccgggtgcagggcctgttcgtggagctgatcaaagagcttggccatgatttggctgatgcgggtttccaccgtggcatcgatgcggctgtgttcggtttcgacccggcaaccaccgggctgcaacgccgcgtcttcgacgatgcgccaggtttcttcatggcgctcgcgcaaggctttgacctgctcgaaatcctgcgggttgatgtacagccgcacgttgccgacgcccaggggcagcagcttgagcgcttcgcgcatcacgctttcgatatggctggaatccagcaccaactcgcgctggatcacctggcgggcaatgtgctgtaccaggccgaccatggccttttcgatctgcgaatcctgctcggcgatggggtcgaacagcgtacccatcaagcgttccaggctggccagcttgacgctcagcgcctcttcggcttcctggcgcaccttgagggtggtgctgcgaaaaccatctttttcacccgccgcaaagccttcgttgtaggcctcctggcggatggcttccagttcttccagggtcagtggctggacttcatccagcggcacttcttccatttccaccggaagttcttcgaccggttccggctcgggctccggcacatgcgggtcgaagctgggcaacgaccagatgtcgaacccaccgacgtcccgtgcgcgaatcagatcgctgggcgcctcatctttgttcgacatgggaagcgccttagatcatttcttcgccgcccttcccgccgagaacgatttctccggcttcggccatacggcgggcaatggtgaggatttctttctgcgcggtttccacgtcgctgacacgcaccgggcccttggcttccaggtcgtcgcgcaacagttccgaggcacgcttggacatgttcttgaagatcttctctttgacgttttcgtccgagcccttgagggccagcaccagcacgtccgaggacacttcgcgcagcaacgcctggatgccacggtcgtcgacatcggagaggttgttgaacacgaacatgaggtcttcgatctggccggacagggtgtcgtcgatctcgcggatcgagtccatcaactggccttcgaccgagctgtcgaggaagttcatgatgtccgccgcacgcttgataccccccagggtggtgcgcgaggcattcgagttgccggagaactgcttctccagaatcgtgttgagttctttcagcgccgccggctgcacggtgttcagcgacgacacgcgcaggatgatgtccaggcgcactttgtggtcgaagtggccgagcacttcaccggcctggtcggggtcgagatacgccaccacgatcgcctggatctgcgggtgttcgtagcggatcacgtcggcgacggcacgcggctccatccatttcaggctgtcgaggccgctggtgttgccacccagcaggatgcggtcgatcaggccgttggccttgtcttcgcccagggccgaggtgagcatcttgcggatgtagctgtcggagccgacgcccaggctggtctggtcgccgacgatctcgacgaactcgctcatcacctgctcgacttgctcgcggtgcacattgcgcatctgcgccatggccacgcccacgcgctggacctctttgggccccatgtggcgcagcacttgggcggcgtcggtttcaccgagggacagcagcaggactgcggctttgtcgaccttggtgagcttggcaacagcggctcgattatcactcatctgcgttgatccactctttcacgacctgggccacacggcccgggtcttctgccaccagacttttgattgcgttcaactgagcgtcgtagccttcgctcgggcttggcaacaggatgctttgcgggccgccgaggctgacgcggtcgttggccagttcgccgtccaggccgcccatgccacccaactcgacgtcgctgccaccaaaggccgccagttgtttcttgccgttgccggtgatgttgttgagcaccgggcgcagcacgccgaacaccagcaccaggatgaacaacacacccagcacttgcttgacgatgtcccagaaccacggctgcgtgtagaacgcagggtcagcgatcacttcgccacgctcggcggagaacggcatgttgatcacgctgacgctgtcaccgcggctggcgtcaaaaccgacagcgtcctgcaccaggcgcgtgaagcgtgccaattcatcggcgctccagggggcacgggtaacggcgccgtcggcggcattgaccttgacctggtcatccaccaccaccgacaccgacaggcgattgacgcggccctgttgctgcttggtgtggctgatggaacggtcgagttcgaagttcttggtcgactggttacgcttgtccgccgggtacggcgcgagcatcggctggccagtggccgggtccatgatctgttggccattggcgtccagcagtggctggcctggctggatggcgccagcgctggccgtcgcgccgccggtggtttgcggggccgaggccggggccggtggctggttgctcagggcgcccggtacgccttggggcgggccattggcggcagtgcgttgttcgctggtggattgctcgctgcgcagcgccggctggtccgggttgaactgctcggaggtcgattcgacagcgctgaagtccacatcggccgacacttcagccttgtagcggtcgttgcccaacaccggttgcaggatgttgtgcacacgctgggtgagcatgctttcgacgcgacggctgtaatcgaactgcttgccggcctgggtcagcgcggagttttccgcctggtcggacagcaggttgcccttctggtcgaccacagtgatttgcgacttgctcagctcaggcacgctggtggcgaccaggttgacgatcgccagcacctggcctggctccagggagcggccggcaaacagttccaccaataccgaggcgctgggcttgcgctcatcgcgcacaaacaccgagcttttcggaatggccaggtgcacacgggcacccttgacgttgttcaggctggagatggtgcgtgccagctcgccttccaggccacgacggtagcgggtggcttccatgaactggctggtgccgaggccctggtccttgtcgaggatttcaaaaccgatattggcgtcggacggggtgacgccggccgccgcgagtttcatgcgcgcacgggccacgtcgtcggccttgaccagcagcgccccggagttgggttccacggtgtaggcgatgtcggcggcggccagggtttccatgatctgcttggaatccatgccggccaggcttccatagagcggccggtaatccggttgctgcgaccacagcaccacggcaaaaccaatcgccacgctcgcggccaggccgaccatcaggccgacctgacgcaacatggtcatttcggaaaggttttccaggaacgacaggccaaacagcggcggcttgccgtctgccttggcgggtgcgttgtccacgactgcttctgccatgacttaaatctcgtccttaaaccggcatctgcatgatgtcttggtaagcctgaaccagcttgttacgcacctgggtcaacgcctggaacgacacgctggccttttgcgaggcaaccatcacatcggtgaggtccacgccgcttttgccgatctcgaacgcgttggccaactggctggaggcttgctgggtatcactgactttgttgatggcctggccgagcatgtcggcgaagctgctttggcccaattccggcgctggcgcgacggatttcggttgagccatggcatccatttgcatggagcgcatatccaacatcaaccgattgaactcaataccctggctcatgaacttctctctccgacaaccgcatgttttttgacgctacgccgcaattactaggtgaagtagcaacaagggtgccagctctggttcaactcgtaagaaaaggcgacaaaccttgtccgccttgttaccgatcaggtggcgaacagatacgcctcgacgtccatgccggcgtcgcgcatctgcgccagcttgtagcgcaaggtccgcgggctgatccccaggcgctcggcggcctctttgcggcggccgcgctcggcgcgcagggtatcgatgatcatctggaattcacggcgacgcaggtcgtcacccaatgcaccggcggtttcggattcgacaaccacgggcgcaggcgccagggtcggcagcggcgcaatcccgctgcccatggccaggcagaaatcctggggctggatcaggccgccctgttgcaggatcaacgcacgctggatggcgttgtccaattcccgcacattccccggccatggataggcgaccaggcaggcctgggcctcggccgacaggcgtgcctgggcatgcttcatttttttgacgtgattgcccaacagccgctcggccagcggaatgatatccgccgggcgctcgcgcaacgggcgccaggccaggggaaagaccgagagacggtagaacaggtcttcacggaagcgccccgccgccacttcgcccgccaagtcacggttggtggtggcgaccacgcggatatccagctggattggcttgcgtgcgccaacgcgctccacttcgcgctcttgcagcacccgcagcaacttggcttgcaggcccaggggcatctcggaaatttcatcgagcaaaatcgtgccgccatccgcctgctcgaacttgcccgcctgggccgcgatggcgccggtgaacgagcctttttcgtggccgaacagcgtggcttcgagcatgttgtcggggatcgccgcgcagttgatggcgataaacggctgtttggcgcgggtcgattgctggtggatatagcgggccagcacctccttaccggtgccggactcgccggaaatcagcacggtggaatcactgcgcgccacgcgggccgccaattccagcaattgtgcgctggccggctcgaaggcaatcgggccttcgccgtcgctgggcgggatcacgcccagggcatgccgcgcgaccagttcgatcaaggctttgggctcgaacggtttgaccagataatccgccgcgccctggcgcattgcgtcgaccgcacgctcgacagcgccgtgggcggtcatcagcaacaccggcaactgcggctggcgcgcgcgcaacaggctgagcaactggtggccgtccatgcccggcatgttcacatcgctgaccactaggctgaaggactcctgctccaccgcctccaaggcgtcctcggcagaaccgaccgcccggtagtcatggcccgccaacagcagcgtgtcagccaatgcttcacgcagcgcgcgatcgtcttccaccaacagaaccttgatagccataacctcttactccgcgcttgccgcacatgaaaacagcggcaaggtcatcaatgcacaggtgccacgcccgacacgggaatgcagcagcaattctccctgatgggcgcgtgccactgccttgaccacggtcaggcccaggcccgtgccgttggtcttggtggtgaaaaagggttcgcccaggcgctgcaacacgacgggctcgataccgctgccactgtcgctgatgcacaggcgcagggtttgctcgcggctgtacaagtgcactttgagccgcgcaccggggccgctggcctgggtggcgttttcgatcaggttgagcagcgagccgacaagggtgtcgcggttgcacagcagctcgccgagatggctgtcgcactgccaacgcacttgcacgtcttgaatgtgagtggcggccgccgcttgcagggcctgcatcaactcggccggcgtgatgcggtcggtcagcggcaattcaccacgggcaaataccagcatgtcgcgcacctgatgctccaactcgtgcaggcgctccttgaggcgcccggcaaaacgctggtgggtggccgcaggcaattgctcatcagtcaaatgactggcgtagatcaacgccgccgacagtggcgtgcggatctgatgcgccagagaagcgaccatgcgccccagcgaagacaaacgctcgtggcgcgccaactggtcttgcaggtgacgggtttcagtcaggtcgttgagtagcacaagctggcccggctccgcgtccagggcgcgcgtggcaatggacaagcggcggccgtccttgagggagatttcatggccgtcgtcttcacgcggcgcaaagcagcgggtgatcacgtgacgccacagctcgccttccaggggcaggccaagcatgtcgcaagccgccgggttggcttcacgcacgcggccttcttcgtcgatgacgatcacgcccccgggcaacagcgacagcaggttttgcagacggttggccaggcgctccttctcggccaactcttccatgcgctgggcactgaccaccgccaactcgcccttgagctccgaaacacgggcttcgagcaggctgtaggaatcggtcaattggctggacatctggttgaacaacgaaaacgcctgctccaggccttggcggctttgctgttctacagagggaacgagccccgggatggcggggctggaagaatgttgggcggcgtggggcatcatgctctctcgcttggctgaccgtcagttaaacggaacgttgcgagggctgtagcaatacccgtgccgaaaaaaaaccgctgataaatcagcggtttgaaaaacaggcgtcaatcatccgcctgttcatcaccttctttgcggctcataccgtatttgcgcatcttctctaccagggtggttcgacggatgcgcaggcgctcggcggcacgggcgacgatgccgttggcgtcgtccagggcctgttggatcaggccttgttccaggttgccgaggtagtccttcaggtccaggccttcgggcggcagcatcgcggtagagccgaagtccggggtatgaccgttgatggccacccgttcttccaggtcgctgcgcaggctgtcgaccagttgctcgtcttcgtcgtcgacgtagcggaatttcttcggcagctcgaccacgccgatcacaccgtaggggtgcatgatcgccatgcgttccaccaggttggccagctcgcgcacgttgcccggccagccgtggcggcacagggacatgatcgcggcggagttgaaacggatcgagccgcgcttttcgtgttccatgcgcgagatcagttcgttcatcagcagcgggatatcctccacgcgctcacgcagcggggccatctcgatcgggaatacgttgaggcggtagtacaagtcttcgcggaagctgccgacctcgatcatgctttcgaggttcttgtgggtggccgcgatgatgcgcacgtcgacgctctgggtcttgttgctgcccacacgctcgaaggtgcgctcctgcaacacgcgcagcagcttgacctgcatcggcagcggcatgtcgccaatttcgtcgaggaacagggtgccgccgttggccaactcgaaacgcccggcacggctggtgatcgccccggtaaaggcgcccttctcgtggccgaacaattcactttcgagcagctctgccgggatcgccccgcagttgaccggcacaaatggcccgtcgcgacgcttggagtgatagtgcaggttgcgcgcgaccacttccttgccggtgccggactcgccgaggatcagcacgctggcgtcggtgtcggccacttgctgcatcatctggcgcacgtgctggatggcacggctggtgccgaccaggctgcggaacaggttgggttcgcgatggcgaccgcgctcgcgggcctggtcatacatctcgcgatagacctgggcacggtgcagggagtcgagcaatttgctgtagctgggcggcatctccagggtggaaagcacgcggcggcgctggtcttccggcaggtcgacagaagaaatatcgcccatcagcaacacgggaaggaactcatcccaggtagacagtgtctttaacaagcccaaaacagcaccaggagcgtttaccgtcccgatcagcacacaaatgacttcacggctcgatgacaatgagctgaccgcctgctgccagtcatggctgccgcagggcagattttcttcgccaagaaaattcaaaatcaccgctaaatcgcggcggcggacgctatcgtcatcaatcagcagaattttggtttcacgccacatgcaatagcaacttccctagtaaaacttcctgccccagagtgagggcaatcgagacgcctgtacgactttgtaccttactagacgtctgaaatctgaaaacagcactagttaagtcaaaaatgctggcacagtcaaatatatgacgcgcccatcggaccaactgcggctcttcagccgaacagatggtaaacctttgacgcatttttcgcttggttgatctgcgacatctcttcgaaaatcgcctgccgctcacccgtcgtcacctcgagcaattgctggtaaaccgccagcagactctcaagcttttcacgcaacgcatcctcgtctaccggcgcttcgctgagcacctcgtcgatgacatgacgacagcccaggtccagttcgccgatggcgtcccagttgcggtccgccagcgcgcccatcagcgcctcgcgggtttcatcaatgcgttgcaatgcttggctcatgacgtgttcctcaaggccgcttggccttattgtgcagcgccttgtggcgcgccgatggcatcccagccttctttcacggtaatcagcaaacgggcgacttcgtcgatcatgtcggcgtcgttgtgcagattggcctccatcaaacggttggtcatgtacacgtacagaccttccagttgctgaacgtattccttgttgtcgcttttttccgcgctcaggccatcacgaagcccgatgaggatgtcggcggccttgcccagcatcaggccctttgcggcgatatcgccacgcgccaacgcacctttggcctgcgccatgcggtcgagcccgccctccatcagcatttgcaccaggcggtgcgggctggcttcggagatctgggcatgggaattgaccttctggtattggcgaagggctctcatgggattcatgtttctacctcgtgacaggcaacagcgagaagggttgcaataaccattatgtcgactgggtcgcaaaaaactttaacccgacggcactatgaagaacaaagcccaggtcaatggacctgggctttttcatcagccatcaatcagctgcttttctgggcgttactcagcgcgctgagcgtacccaggatactgctgctctgctggcgcagttgcgccaccagcgtatccatggcggtgtacttgcgggtcaaggagtcttgcatggtggtgaggcgttcatccaacgcaacttgctgcttgttgaggtctttaaggctgtcggacaacgacgttgaacgcgtcgccaggatcccggtggtggccttggcatagccatcggtcgccgccgtcaggcgcgcgagcaggccggtcttgccgctgaagatactgttgatatcggcagcgttggtcagcacagccttgtcccactgcttggcatcaatgctcagcgcaccggtgtcgcggtcagtcgtcacaccgaattgcgccagggacttcaaggtgccattgccggacagggcgttgaactcgttgcggatcgccgcctgcaaggtgcgcatggtcgagtcgccggtcaaggtggcggcgacggagttaccggcggcatccttggtcaccttggtctcggcgttcatcgccttgagcagggcgttgtaggtgtcgacgaagcctttgaccccggacttgagggcggtggtgctggtggagacggagatggtcaaagcattgcgagccgtagacgcggtatccgaaggcgtggtcaagggcgacacagagagcaacttgatacttacaccactcactgcatccgtgatgctgttggtcttggactctgcagcaataccgtcaatggtgtacttggcgttcttcggctcgctgaccaccgtgtaaccggtatcaatccccgagttgcccgacatcgtcagatcggaaccaacaccagcattggtggaggtcaggataagacgcgaaccgttggagtcggtgaggatgttggcactcaggcctgcggtgccgaactgcgagttgattgagtcacgcacctgttgcagggtcgcgccggccggcaccttcaggtcgaagttcttgcccgactggctgatcgtcagcgtcgttggggtggtgccactgttcacgaccgtcgactggccgccagtgaaactcttggtcgacagcttcgacggcgtcgccaactggttgacgaccagcgagaagctaccgctcgccgcaccctggttggccgtcatggtggcgaccttctcgtccgaagacgtaccggtcaagccactgaagctgttatcggtgcccatgctggtcagcgcaccccggaaggcgtccagggctgcctggatcttgccgatcgacgacagctgggtggttgccttttgcgactggaggttgatctgagcctgtttcggcgctcgctcggcatccaccagggatttcacaatcgcctgagtgtcgaaacccgaccccacgccggtaatcgttgtacccgccatcatctttctcctgttccggtggctgccgttatcttgacgactagcgcttcaagcggtgacagcaacaagtttcatgccagttcacgccttgtcgtcaaacaatacatgactggcgctggccagactctgtgccagtttcaaggccgtttccgaaggaatctgtcggatcacttcaccggtgtcggtggcaatgaccttgaccacaaccctatgggtggaatcgtcaatggaaaagtccaggttgcgctgggccgcttgtacgaattctttaatatctgtaaccgctttttccaggctgtccttttgggacgtgcccgcggttggcgcggccgcttcaaccttagtcttgtctttgtccgcaaccacaggtgccggagtgccttgaggggccaacggcggataagacaagttcagttttacactcatgtccatgcccaatctcctctgattggaaaagacgaaagggcacgtaaacgcgcccttccgtcattcaccacgcgtcgctattactgaagcagcttcagtacagcggatggcagttggttagcctgcgacaggatcgcagtggaagccgactgcagggtttgctgcttggtcagttcagcggcttcggaagcgaagtcgacgtcctggatggtggaacgagcagcggtgctgtttttctggatgttggacaggttgtctacagtgctggtcagacggttctgtaccgcacccaggcccgaacgggagctggagatggtagcgatagcctggtcgatcacggacacagcgttctgggccttggtggcgtcagtcacgtcagtttgcgatacggaggtcttggtcgaagcagccgaagtagcagcaccgaagacaccagtcacaccagcgccttccagggagtaacccttggcggagtccaggttcactgcaccggtagcgatgatgccgtcagccagggcagtggcagtgccgtaggtgcccgaaccgtctttggtggcaacagtgatggtgccggcagcggtcgaagcgctgaaggccaggttttcaccggtgtcggatttaaccgacagagtgcctttggactcgtcgtagttgacgctgatacccaatttggcggagttcgacttcagttggtcagccaggctggcagtgtcttttacgccaacgaacgtggtggcttggccgccaacggtcatggtgaacgaagctggagcggtagcagcaccggcgccgactacgaactgagcttcagtgctggcggtagcgctcaggccaccgacggcgccgttcagctgggcagcgatggttttagcggaagcagcagcagcaacagtgacgctgctagtctggccgttaccggtcactgcgattgcgccgccagctacaccagcacctggagtgatgccgatgctcttcacctgctgcgaaccgatattgttggcagcaacgttatccagggacaggttgatggtttcgttagcgttggcgccaacctggatcgacttggtaccgtacgaaccgtccagcagcttctggccaccgaaagtagtggtctgggcgatacgggtcagttccgaagtcagggcctggtattcgtcgttgttcgacttacggtcgtcggggctcagggagccggtagccgaggacagagccagagtacgcattttttgcagaatgtcggtcgaagcctgcattgcgccttcagcggtctgcgcgatggagataccatcgttggcgttctttacagcttgacccaggccgttgatctggctggtcatacggctggcgatacccaggccggcggcgtcgtctttagcgctgttgatacgcaggccggaagacaggcgctgcatggaagtggccagggcgccgccagctttgttcaggttgccctgagtagtgatcgaagcaatgttggtgtttactgttaaagccatgacgaaatcctcgttggatggatactgcggcttccggccctggcaaccgccgggtgtggcctgagaacctacgtaatagttatcgtcgtggtagccggttgcttgaggatttttttcgatttttttgctggcgtcgtgccaccccttgtaattcaagggcttacgcaggcaaaaaagcccgatttcattggcttttctggcgccaaataaaaaacgccgatgctctttcgagcatcggcgtttttttgtgctagcggttcaaggtgtcacgggcgatagagaatcgccgagccccacgacaggcccacaccaaaaccgctgatggccacgcgtttccaggtggcgtccatcacatgcttttccagcagcagcggaatgctcgacgacacggtgttgccggtctcgaccatgtccttgatgaacttgtccaccggcgcatcttcaaaacgacgcgccacggcgtcgacaatcgccgcactgccctggtggatgcagaaggcatcgatatcgtcggccttgaggtccgactcatcgagcagctcgtgcaaatgcgccggcaccttgagcaaggcgaagttgaacacctgccgaccgttcatgaagaacacaccgtcgctgactttaaggtgcggggcgccggaaccgtcggtgccgaacttggacttgccgagcaaccacggcgcgtcttcgcccatccaggtagccgtagcggcatcgccgaacagcatggtggtgttgcggtcttccgggtcgacgatcttcgaatacgggtcggcggtgaccagcaggccattcttcaggccagcggcttccatgaagcccttcatcgcgtagatgccgtagacgtagccggagcagcccagggaaatatcgaaggcggcgacgtgggtcggcaaaccgagcttgtcctggacgatggcggcggtgtgcggcaggccctcttcgtcgccgttctgggtgactacgatcagcgcgtcgatcgactcgcgcttcaaatccgggttgttggcaaacaaagcgttgaccgcctcgacacacagatcggaagtttcctgcgcggcttccttgcgcggcaggaacgccgacccgatcttgccaatgatgaattcttcatccttggcgaatttggcaccctgggcgtagttatcgatcccgtctgccggcacgtaactggcgatgctttttatgccaatcattgtggcttcccaatactaaatagctggagaacacccctgggactacgcccggagtgctgacaataaaggggataaccccataaaaatctcgctgaaagccgccacgtaaggaccctgtgacgacttatccttttcacacgatacagtgaagatgcgctttatgactcacaggtcactcaattgtgtgtgctttatgcaaaaccttcaaacaattaaaccccagaaacgacaacggcccgccgtgtttccagggcgggccgcttgacgtgaagccacttacatcttgttgaacaggctcaactgcgagattttcacgaaggccagctgggaggcttgcagcatggtttgctgcagcgccaggttgatggccgcttcacccatgtcgatgttggccagatcactcatcgtgctggtcgtggcaatgctgatgcttgagttctcactggcctggatctccaaggcattctgccgcgccccgacggaaccccgcacattgacgatctgggacatcgaattggccaggttggcgatggccgagttcatggcatccttgagcttgaccgtcgctgccgggttgccgtcggccggcgcctccagcgccttgcgcaactggcccagggtatccagcgcattctgggtcttctgggtattggcacccaccgagaactgatcgcctggctgcggcgggccgctgctcacgtcaaacgtcacgccggccgccgtcaccgtggtaccgccgccggtatcgccggtggcgatcgccttgctggcgctcgaatagggctgggcatacacctcataggccgtcgcgctggtgaacttgatgatcgccccgctgttggacgggaacgtgctggcatagtccgcctgattggtgacctgggcgccggtcaactgtgcgctcgacgcattgctcggcgtacgcgacacgctgaacgtgtctggcttggcctccaggctgaaggtgcggtccttgaccaacgcatcggagttggcgcccggcgccacgtcaccgaggttcatggtgatatcgaacttcaccccccgcagtgcaacgctggtgctgccttccttggtggcgtcgaacgtgccattgcccggtatctcggaagtcacgtcattgccgttcttgtcagacaccttgtattgcgtgctgctggtaaaggtcagcttgtaaggctggccgtcggcgaatttgttggcgtagtcgccgctcgatgtcaccagcccggccgagagcgccaccttgtggtcattgaccgtaggtggcacggtctgcgggttcggcgcaacccagggggcctgggtgcgaccggcgttagccgcaccttcaaggatggtcttgccggtatcacccgcgctgacattcagcgtattggaaatctgcaggctcagcggagtttcatcaccctggtagctgtaggtgccatcgttgttgcgcgcatacggcggcgtctgggtcttggagccggaaaacaagtagttgccggccgagtccttgctgttgagcaggcccaggacctgatcttcaatcgcaccgacctcactggcaatcgagcgacgatcagcatcactgccggcaccaccggccttgagtgccagctccgtggcacgctgcatggcttcactgatcgcacctaaaacactctcttcgttagtcagcgagtttttcaggctggtgatgttgcccgtggactgggccactatgtctttttgctgctgcagcatcaacaaccgcgccgccgccacaggatcatccgcggcggtctgtacacgcacgccggagctggcctggtcctgggccttgaccacacccgaatagttatccgaatacttggcggagctggtctcgaaatactgctgtgtagaaatacgcatcgtcccaggctcccttaaagactattgatcaatgtgctgaaggtttcttgcgcagccttgatgatctgcgacgacgccgtgtagtactgctggaacttgatcatatcgcccgcctcttcgtccaggttgacctgggacactgagttgcgcgcgttcttgttggcggtcagcaatgcattcgtcgcggtgctgtcggtaccggcagccgcagccttggcgccaacggtagacaccaacttgctgttggcccccaccaggctggtgccgccagtgccatcagcggccgtgccgatggttgccttggtctgcaggcttagcaggtcaagggcgttgcggttgtcggacttgccggaggcattgaacgagaacgtcgtgctgtcgccgttggccggcgaaccgcccaccgtggtgtcgaaactgaaactcttggccggcaccaccaaggcaccgttggcatcgcgcatcggcacgttgaccgtgaccttgttgccctgccccggaacaatgctgccggtgccgatcgggttgccctgggcatcattgagcgtgtacggctgggtgccatcggctgccggcttgccgaacaccatcttcaccggcatcgagtgttcaatacccgtgcgcaattgggcagtggcggcgccgccctggatatccaggggcaccgtcagggtcggcggggtaaacgtgccggtgccctggttggtcttactggcttgcccggataacggcgcagcaaaggcgatcttgttcggatccgtcagcaccgtgccaatgtccttggcaccattggcggtcggactgaccttgaagctgtccccggtggccatcggccccttgccatcgagcgccaaggtgaaaccatcgatcacggccggtggcgtggccgtgacgtcaaaggtccccatggccttgccatcggaacgcaccacggtgacgttgttcgggttggcgctgtcgctgaaggtgaccttgtaatcgaaattggtcagcttgctgctgtccttgatcgtcacgttcaggttgccggaacccgcgctgttgtcacccgaagcctggctgcgctgggcaatggcggcggcgctgttgatatccttgaacagcgagctgccgaactgactattgaggtcaaggccctggcccaactggttgttgatggtgtctgcggtggcgatggcaatgcggcccagatcattgatggcaggcatcagcgcatcggtgcgatagcgcaacagaccgccgatgctaccgccgctgagcacgttgcccaggtcgagcgactcaccgccgccaacgttgagctggatggtgaactggctggtgtcgttcttgctcggtacggcggaaatcgtgttggactggtcacccagtaccagcgactggccggaaccggtgctgacactgaacacgccattcttctcggtggcggtcacgccgaccaattcgttcagcgaacgcacggcttcggcacgtgcgtccagcaggttggccggggccgtgttcgacgagccctgcacctgggcgatctgcttgttgagcgaggcaatggacgaggtcagcttgttgacctggtcactcatcgagctcaactggccgttgatggtttctttctgctggcccagttgcgtagagatcgagttgaagcgattgctcagcgtctgcgccttggtgatcaacacctggcgggccgagacatcgctcgggttggccgaggccgtctgcacggccgagaagaactcactgagcacagccgacatgccggtggtcttatccgacagggtcttgtcgacggcgctgacctgatccaggtacgccttggcatcgctgttgagcgaggtgctgttctggtacgccgcgtcgaggaactcgttatacacccggcgcacatcggccagggtggtaccgctgccgatgtacacaccgccgtactggttcgccgcgctggcattctgggtggtctgctgacgcgagtaacccggagtgttggcgttggcaatgttgttactcaagaccgacagcgatccttgagaggcgttgagccctgacatcccgatactgagcaaactcatggttcagaccttataaatgtgtggttgcgccagcggcagcgtaattctggtaactgtccatcgttttggcgatctgcgaaatcttgctggcataggccgggtcggtggcgtaaccggctttttgcaactcacggacaaactgttccgggttgtcggccgatttgatgacttctttatagcgatcattgctttgcagcaaggtcaccaggtcatggaagctgtcctggtaggagttgtaggaacggaactgcgccgtttccttgaccatcgccccatcgcggaactcgctggtgatcgcacgcgcctggccgccctgccaactctggccggccttgatgccgaacaggttgtggctgctgctgccgtcttcggcacgcatcaccgatttaccccaaccggtttccagcgcggcctgggccaccaggtacttcggatcgacaccgatgcgcgcagcggccgccttggccatcggcaacatggtggcgacaaattcatcctgcgaactgaaggctttcttcgccggcgccaacggtggctgggctacggcgcggccgtagacctgcatgcgcccgctcggcacggcgaaggtgcgcgcgctgctgttgatcacgttgtcatcggccacgctgttgcgcagcggcgcgcttttggcgtcaatcgcgacaggtgcgttcggtacgatgccggccagcaggcgatcggtcagcttgctcggcaaggcgatacggcgctggttcatcaattccatgtcattgctgtgggacgccgcagcgccagcctgaggctcagcaacacggtaagcccacagcggacgctggccattggagcggcccagcggcccttcggcctgggtgcctgccgcaatctcggtcggcacatcgactttcttctcaggcgtggtgcctgccgggccctgcaaggtggcggcctgggcctccaccggcttgttcttctgcatctggcgcatcagcacgtcggccaggccgatacccccgccttcacgggacatcgaaacggccaactgctggtcgtacatttcctggtactgcttggccgccggcgtgttcatcgggttgtctttacccagcgcctcggtggccgaacgcatggacttgagcatttcgctcaagaacagcgattcgaactcctgcgcgaccttgcgcatgttgccttcgctgttcttgtcggcaccgaccttgagctggttaagccggttcaggtcggaataagaccccgagtccgccgtgctgctgatcccgctcttgcgcatatccatggccatggcctcagatcacgatcaggtcggcttgcaaggcgccggcctgtttcaatgcttcaaggatcgccatcaagtcgccgggcgctgcgcccacctggttcaccgcgcggacaatctcatccagggtggtgccggggccgaacttgaacatcggcttggcttcttgctgggcattcacccgcgaacgcggcaccaccgccgtctggccgttggacaatggccctggctggctgacgatcgggtcttcggtaatggtcacggtcaggctgccgtgggtcacggcggccggcgagaccttgacgttctggccgatcacgatggtaccggtgcgcgagttgatgatgactttggctacagcctggcctgggtcgacttcaaggttttccaggatcgacagatagtcgacccgctggcttgggtccagcggcgccgtcacgcggatcgagccaccgtcgatggcctgggccacgcctgggccgagcatgtcgttgatcttgtcgaccacgcgcttggcggtggtgaagtcggagcggttgaggttcaaggtcaggctgttgccttggttgaaaccacttggcacggtacgttcaaccgtggcgccacccgggatacgcccggccgacggcacgttgacggtgatcttcgagccgtcgcgaccttcggcgtcaaacccgcccaccactaggttgccttgggcgatggcgtagacgttgccgtcaatacctttcagtggcgtcatcagcaaggtgccgccgcgcaggcttttcgagttaccaatggacgacacggtgatatccaccacctggcccggcttggagaacgctggcaggtcggcgctgatcgacaccgccgcgacgttcttcaactgcacgttgcccgagcccgccggcactttgatgccgaactgcgagagcatgttgttgaaggtctgcagggtgaacggggtctgggtggtctggtcacccgtaccgttgagccccaccaccaggccatagccgatcaactggttggaacgcacgccggagatgctggcgatgtccttcaggcgttcggcctgggcgacagcgctcaaggaaagcaggagtgcggccgccatcagctgtttgaagttcaaagtggccacctagaaagggaacagcgggctaaggaagaaacggtcgaaccagcccggctgactcgcatcagcaaacgaacccgtacccgagtaggtaatgcgcgcatcggcaatgcgtgtcgacggcacggtgttgtcggtggagatgtcatcggcgcggaccatgccggcaatgcgcaccaactcatcgccggtgttgagggtcatccacttttcaccgcgaatggcgatgatgccgttgggcaacacgtcggccacggtcacggtaatcgaaccggtcaggctgttgccctgccccgccgcgctcttgccgttggtggcacggtcgccgctgtagccggcgctaaggctcaagtcaccactgcccaacgggttgttggtgttaggcactgcgccaaacaacgaggtcaggccgataccggtcttgctggtcttgcccacctgggagttggcgttcttgctggcctgagtcttctcgttcagggtgatggtgatgatgtcaccgacccggaacgccttgcggtcgctgtacaggttctgttcgaaaccggcctggtagatcgagccattgttggcggccgctggcaacggcgtgcgtggcaacaccggcgcatagtacgggtcattgggttttggcgtcggggcgacacagcccgcgagcacggtaatcccactcaatgccagaacagaaacatagcgattcatgacccttacctcacggtgttgcaggcgccctcaagagcgccccatagacttgattacagattctgcgttacgaacgaaagcatctggtcggcagtggagatcaccttggagttcatctcgtacgcgcgctgggtggtgatcatgttgaccatctcctcaaccgtgctcacgttggaggtttccagggtgctttgcagcgtggtgccgaaaccgttcaggccaggggtgccgatttgcggcgcgccgctggaggcggtttccaggaacaggttgttgcccatggcttgcaggccggccgggttgatgaagtcagcggtctgcaggttgccgatcacttgcgacgcggggttgccggccacggtgatcgacacggtgccgtcgttgccgacggtgaaggtcttggcgtcggctggaacgatcacggccggctccagggcgaaaccgttggcggtcacgatctggccgttagagtccaggtggaaagtaccgtcacgggtgtaggaagttgtgccgtccggttgcaggatctggaagaaaccgcggccgttgatggccatgtccagcggctggccggtttgctgcaggttaccggcgctgaagttcttctgggtgccgacgatctgcacaccggtacccaattgcaggcccgacggcagttcgctgtcctgggtcgactgggcgcctggctgcttcttgatctgatagagcaagtcctggaactcggcacggtcacgtttgaaacccgtggtcgacacgttggccaggttgttggaaatggtggtcaggttggtgtcctgggcggacaggcctgttttggcaacccatagagccggaagcatgctgttctccttcgtgcgcctgtttgttggcgctgcgccgcaaaattagtgtgttggatcagctcatctgcatgacgcgcgtcatggcctgatcgtcttctttagcgctgttcatcatcttgatgtgcagctcgaactgcttggaaagcgccagcaccgcagtcatttcttccacggcattgacgttgctcgcctgcaggaagcccgaggtcagcttgacgttcgcgtcggcctgggccggctggccatccttggtatggatggtgccgtcgaggcccttattcatgttcttcaggtccggctggaccagcttgatgcggtccacttcagccatcacccgcgggccttcgcccatggcgcggatgctgatggtgccgtcggaacccacttcgattttctgctggggcggcacggcaatcgggccaccattgcccatgatcggcataccgttgccggcgcgcagcacgcccaatgcatcaacgttcatgctggcgctgcgcacgtaggcttcgctgccatcaggggtctgcacggccatccagccatcgccgttgacggccacgtccaggtcacgaccggtctcgatcattgcgccaggggtgaagtcggtggccggacgctcagtcatggcaaacgcccgcgccggaaagctgtcgccgaacaccggcatcgaacgcgcctgctccaggtcacgttggaaaccattggtggaaatgttcgccaggttgttggcatgggccttctgcgccagagcattctggctggcgccggtcattgccacataaaggtacttgtccacgcttcttcctctttctgacggacgcttgccgcccaccgctgtactgatgaggcttaagcaatttgcgaaccaacttttgaaaagagggagaagtgcaggcggggcgggggtttgccgtgaggtggggggatttcagggttgagcgtgagtcgaaaaaacggcggactactgccgcctgcggcaagtcccgtccttgaaaacgacaaagatcaaatgtgggagggggcttgcccccgatggcggtggatcagccacatcacagctggctgacactctgccatcgggggcaagccccctcccacatggggttatttatcggtcttgaggatttcgtaatcgcgcagcttattcgcgatggtggtgtgcgacacccccagacgcttgcccatctgccgactgctgggatgctcggcatacaaagcttccagtaccgccttctcaaatcgcccgacaatctcatccaggccaccctccagcgaaaaatcgccaagcggctgacgcacgccataatccggcaaccggatatgctcggccttgaccgtcccgccgtcgcacaacgacaccgcctggaacagcacgttttccaactgccgcacgttgcctggccagtggtagtgactcaggcgctccatcgcggcgggcgccaacctgggcagcgggcaaccgatctgccggctggcctggtcgagaaagtgctcgaccaacggcgccaggccatcgaggcattcgcgcaatggcgggatatgcagggacagcacattgaggcggtggtagaggtcctggcggaattcgccacgggcgcacagctcggacaaatccacttgggtggcgcagatcacccgcacatccaggtacacctcttcatcgctgccgacgcgacggaagcagccgtcctgcaaaaagcgcagcagcttcacctgcaagcgcgcactcatttcccccacaccgtcgagaaacaacgtaccgcccgccgtcagctccagcaggcccagcttgccttcagccctggcaccctcgaaggcgccagggccgtagccgaacaactcggtctcggccatcgactcaggcaggccggcgcagttgagcgccatcaacggtgattgcccacgcgggctggccaggtgacaggcccgcgccagcagctccttgccggtgccggtttcgccttctattaatagcggcgcatccagcggtgccatgcgtcgggcttcgcgcaccacggcggccatgactctggagctttggaagatgctgtcaaagccacgcagttcctgcttgcgcacgttgtagatgcgctcaccgacgcggtcggcgcggtgcagggtcagcacagcgccggccatggcctcgctgtcgtcatgctcggaggattgcagcggcgcgatgtccgccaggaacacgtcgcccttgaccttgacccgcaggccgttgattcgcgacttgctcgcgcgcaccagctccggcaagtcaaagtcctcggcgtagcgcgacaacggaatgcccggcacctcatccacccgcaccccgagcaactgcgccgcggcgcggttggcagcgacgatggaaccgcccatgtcgatggacaacaccggaaactccagggcacccagcagtgcattgagctccatatgccggcgctcgctgggcatcagccctaccctctttacgccaaacaccccggcaatcgcctcgaattgcgggcgcagcgcctggaactgcatgttcaccagattcggacaaaacaggtagatggcattgccatgctcaccgccgacctcgcccttggcgacgttgacgccgtattccaccagcaggttgaggatgtcccgcaggatgccgatgcggttctggcagtgcactttgatacgcatgaagaggcccgaaaagtggggaggcgccgcgtctttttgtcgctgggcgcagatagtcgtcaagattatgtgacagccacagcgactttcccagcccaatgcagcggtcaacctcacaagcgtaacgaatagtttacgaaaagcagtaatttttcctacatagaggcgttttaaacagatggaatctggccccgcacgggttatcaataggctcatcgcaggacataacaagaacgaatgcctagcaggagagccgtatgaagcagacgcagtacgtggcccgcgagcccgatgcgcaaggttttatccactacccgccggaagaacacgcggtgtggaacaccctgatcactcgccagttgaaagtgatcgagggtcgcgcctgccaggaatacctggacggcatcgataaactcgacctgccccacgatcgcatcccgcaactgggcgaaatcaacaaagtgctggccgacaccaccggctggcaggtcgcccgtgtgccggcgctgatccccttccagaccttcttcgaattgctcgccagcaagcagtttccagtggcgacctttatccgcacccgcgaagaactggactacctgcaagagccagatattttccacgagatcttcggccactgcccgttgctgaccaacccctggttcgccgaattcacccacacctacggcaagctcggcctggcggccaccaaggagcaacgggtgtacttggcgcgcctgtactggatgaccatcgaattcggtctggtggacacccccgaaggtcgacgcatctacggtggcggcattctgtcgtcgcccaaggaaacggtgtacagcctgtcgtccgagcccgaacaccaggtgttcgacccgctggaagccatgcgtacgccgtaccgcatcgacatcctgcaaccgctgtacttcgtgctgcccaatctgaagcgcctgtttgaagtggcacaggaggacatcatgggcatggtcgagcgcggcatgcagttgggtctgcacgcgccgaagtttccaccgaaacccaaagcggcttgaaccttacatcttcaggccaggtgagtctgttccctggccgcgcgttgctttagggtgacgctactgatcttcaaacactcgaattcaggacaccatcatgaccaccttgaaccaagcccattgcgaagcctgccgcgccgatgccccgcaagtcagcgacgaagaactgccggtactgctcaagcagatccctgactggaacatcgaagtgcgcgacggcgtgatgcaactggaaaaggttttcctgttcaagaacttcaaattcgccctggcgttcaccaacgccatgggtgaaatctccgaagccgaaggccatcacccaggcctgctcaccgagtggggcaaggtcaccgtgacctggtggagccactccatcaagggcctgcatcgcaacgacttcatcatggccgcgcgcaccgacgaagtggccaaggacgccgagggccgcaagtaatgcacttcgatgccattggccgtgtacccggcgacccgatcctcgggctgatggacctgtacgcccaggacgccaacccgaacaaattcgacctgggcgtgggcgtctataaagatgaccagggcctgacgccgattccacattcggtgaagctggccgagcaacgcctggtggacacacagaccaccaagacctacatcggcggccacggcaatgccgcgttcggcaagctgatcagcgagctggtgctcggcgccgactccccgctgctgcgcgaccggcgtgccggcgccacccagaccccaggcggcaccggtgccctgcgtttgagcgccgattttatcgcgcaaaacctgccgggccgtggcgtatggctgagcaacccgacctggccgatccacgaaaccatcttcgccaaggccggcctcccggtcagtcattacccctacgtgggcgctgacaatcgcctggacgtggcggcgatgctcgccagcttgtccagcgtgccccagggcgatgtcgtgctgctgcatgcctgctgccacaacccgaccgggttcgacctgtcccaggatgactggcgccgggtgctgcagatcgtgcgcgagcgccagttgctgccactgatcgacttcgcctatcaaggctttggcgacggcctggaacaggacgcctgggcggtccggctatttgcggccgagttgccggaagtgctggtcaccagctcctgctcgaaaaacttcggcttgtacagcgaccgtgtcggcgcgctgatcgtctgcgcggcggatgccgagaaactgacagacgtgcgcagccaactggcgaacacagcgcgcaacctgtggtcgacgccgccggaccatggtgcggcggtggtggcaacgatcctcggtgatgccgagctgaaaaagcagtggagcgatgaggttgaagccatgcgctcgcggatcgcacacctgcgctccggcttggtggaggcgttggcgccacacggtctatcggagcgttttgcgcacatcggcgcgcagcgtgggatgttttcctataccggcttgagtgccgagcaggtgaagcaactgcgtgagaagcacagtgtgtatatggtgagttcgggaagggctaacgtggccgggattgatgccacgcggttgacgctgctggccgaagccatcgccgacgtttcccgctgacgaaacccggaataaatgtgggagggggcttgccccctcccacatttggcttgtgtgcaacttcagccggcgaccatctcggccttgagctgcgcctcttttgcctgcgcatccgccaaccgatacaactcgatactcccatcccagtgctcgatcaacgccgtgcatgactccacccaatccccgcaattgaggtaatccacctcgcccaccttgcgaatctccgcatggtgaatatgcccgcacaccactccatgcaactcgcgtttggtcacctcgtgggcgatggcttcttcgaaatcgctgatgaagttcaccgccgtcttgaccttgtgcttgaggtacgccgacagcgaccaatagccatagccatagcgcgcgcgccaatggttcagccagcggttgagcgtgagggtgaattcgtaggccgaatcgccgaggaacgccagccagcggtgatagcgggtgatcacgtcgaactggtcgccgtggatcaccaacagatgccgaccatcggccgtcacgtgaacggcttcgtccaccagctggatattgcccaggatcagtttggaataacggcgcaggaattcgtcatggttaccggtgacatagatgacctcggtgccgcgcttggccatggtcagcaggcgacggatcacgttggtgtgggcctggggccaatacatgccgccacgcagtttccagccgtcaatgatgtcgccgaccaggtagaccttgtcggcgtgatagcccttgagaaattgcgacagatgctcagcctggcaatcccgggtgcccaggtgcacatcggaaatccacagggtacgcacccgttgcttgcggctgggcttggtgaactcggcactggtcatgggcatccctcgacggtgttttcgcgagcttgcgccctggcgattaatagcccatgacaactgtgcgtcagtctgatgacagcgcctgccggccgcaaagcgttgtagactgccggcttgccgccccggagatcactatgggacccgccctcaccctgcgccattacctcgaagcgcccctcgcccacagccatgatcatgcgcagttggtgttcggcctgtccgggcacctggacctggaagtcgatgggcgtggcagccaggtccgcgaaagcagcgtgatggtgctgcccttctcggcccaccatgcgtgcggcagccgtgatggcagccggtgcctggtgctggatgtgcccaccgagcattgggtgctgcaatcgctgggcgaacatgccgacgccagccgccgcctgctcgaccaaccggcgcggctggccctggatacgcggcagagccagttggtgcaatggctggcgcaaagcccggtgcatgacccgctgatcgtccagcaaggggcggtgctgttgctggccagcctcaatcatccccaggcccaacccctgccgggacggcgcctgccgtacgcggcgttcaatgcgcacatcgagcgccaccttgcgcacccgctgcaggtggcggacctggcgcgtatcgccgacctgtcggtggcacgtttacacgcacgctttatcgccgaatgcgggcaaacgccgatggactacatccgcagccgtcgcctgcagatggccttggacctgctgcgcaaaacgccgctacccatcggtgaagtcgccgatcgcgtcggctacacctcgcaaagcgcctttgccgccgcgatgctgcgtgagttcggcgcatcaccgggggcattgcgccgcaacgcgtaggaagagtcctgcgataaaaaacgcgagccgcacgacagacatccacaccggcgccccactagactgcgcacttgccacccgcttgtctcaaggatcgcaatgactccccgctcagccctcggcgccctgcatatcggcgcattgatgtttggccttaccggcgtattcggcaaactcgcggccgcttcgccggccatcatcgtgtttggtcgcgcggtgtttgccgtggtggctcttgcggtgtttgcccggttcgccagcaacacggcgtggaagacactggaactgcgcgactggcgccggctgctggtgagcggcgtgttgctggcagcgcactgggtgaccttctttatcgccgtcaaggtggccggcgtggccgtcgcgacactgggcttcaccgcgttcccggcgtttaccgtgatcctcgaagggttgattttccgcgagcggatccgccccaacgaaatcgtgctggtggtgctggtcagcgtcgggctggtgctggtcaccccagacttcaacctcgccagcgaagccactggcggcttgctctgggggatcgcctcggggctgttgttttcactgttatcgctgaacaaccgcgccagctccggccgcatccccgcagtgcaggcggcgttgtgccagaacgtggtggtcgctgtttgcctgttgccggtggcggcaccggggctgaccgaagtacgggcaatcgactggctgtggatcggcttgctcggcgtgttctgcaccggcctggcccacagcctgtttgtcgccagcctcgcggtgatcaaggcacgcaccgcctcggtggtgttcgccatggagccggtttacggcatcaccgccgcctggctgctgtttgccgaaacgccgacgctgcgcatgctgctgggtggcgcgctgatcatcgtcgccattgtgctgtcggggttgatgggcagcgccagccaggccaaacagcccactgcaacggcctgatctatactttcaatatccgcaacagtcagcagtcgttcaacggataaccgacagctcgacgacagccagggtgtgttctgaagttgctgcaagcgagtggtcacaacctcaacgcgatgcgggagctttaccatggaaatgctcatcagcttattggtacagatcatcagcggggcggtcggcggcaacgtcgccggcatgaccaaacagagcctcgggaccgggctcaatacactgatcggtggtgtcggcggactggtgttgggtcaggtcgccgcggcattcacgggcacctcgggcggtgaagcgctggatgtagcggcagttggcagcaacattgtggggggtgggataggcggcctcatactgacgtggctggttggcttcatcaaacacaagatggccaccaaatagggctgcactagagggtcaccgcccccaataaggcggtgactttcactgcgtacggtcgttgtgccccaggtcacgctgcgggtcgatcctgtcgcgtacgcgctgcttgagcaccttggcttcggggaaaccaccgtccgccttgcgttcccagatctgcacgccatcgcaggtgatgcgaaacgcgccgccggtggccggctcgagtgagaccttgcccaggtcatcggcaaatgtactcaacagctcctgcgccagccacgcggcgcgcagcagccactggcactgggtgcaataggtgatgacgatctcgggtttgcttgtggacataacttgagaagctcctggcataacgggctcggcggatcgagtggctataataccggcctttatcgcccagccccgagattcctgatgcgccgcctgctgtcctgcctgttgctgtgcctgctccctctgcttgccgacgccattgaagcgccccgcccgaaaatcggcctggtgctgtccggcggcgccgcccgtggcctggcccatatcggcgtgctcaaggcgctggaagagcaaggtatccagatcgacgcgattgccggcaccagcatgggcgcggtgatcggagggctgtatgcgtcgggctacaagatcgatgagctggaaaaactggcgctgagtatcgactggcaacaggccttgtccgacgcaccaccccgcgaagacgtaccgttccgacgcaagcaggatgaccgggacttcctggtcaagcagaaactcagcttccgcgacgacggcagcctgggcctgccactgggtgtgatccagggccagaacctggcgctgctgctggaaagcatgttcgcccacaccagcaacacgcgcaatttcgacaagctgcctatccccttccgcgcggtggccaccgatatcaccaccggtgaaaaggtggtgttccacaagggccacctgccccaggtgatccgcgccagcatgtcgatcccggcggtattcgccccggtggaactggacggccggctgctagtggacggcggcatgaccgacaacatcccgctggatgtggcgcgggagatgggcgtggacatcgccattgtcgtggacatcggcaccccgctgcgttcgcgcaagcaactggccacggtggtggatgtgctcaaccagtccatcaccctgatgacccgccgcaattccgaggaacaactcaaggacctgcaccccaaggacgttctgatccagccgcccctcgccgcctatggcgtgaccgacttcggccgcgccaaggacatgatcgacgccggctaccgcgccacccgcgcccttgacgtacgcctggcccacctgcgccctgccgagccggtcgacccgcaattggtggccgcccgcacaccgggcgaacgcaccccggtgatcaccgcgatcagcgtagagaacgattcgaaagtcagcgacgacgtgatccgctactacattcgccagcccctgggcgagccgctcaacctgggccgcctgcaaaccgacatgggcaccctgtacggcctggattatttcgagcaggtgcaataccgcgtggtcaagaaaggccaggacaacaccctggtaatcagcgcgcggggcaagcgcagcggcaccgattacctgcgcctgggcctgaacttgtcggatgacatgcgcggcgacagcgccttcaacctcggcgccagctaccgcatgaatggcatcaaccggctcggtgcggaatggctgacgcgggtgcagatcggtgaccgccaggagctgtacagcgagttctaccagccgatggacaccggctcgcgctactttgtcgcaccgtacatcagggcccaggcgcagaacgtcgagctgaccctggacaacgacccgatctccgaataccgcctggagcgctacggtttcggcttgaacgtcgggcggcagatcggcaacagcggcgagatccgcttcggcgtcggcgaagcctggggcaaggcggatgtgcgcatcggcgaccgggattcgcccagtgtgagtttcagcgaagggttctatgaattgaaatactccttcgactccctggacaacgtgtacttcccccacagcggcgaagacatcggcctggccttgcgcgaattcgaacctgggctgggctcggaccagcgctaccgccaatgggagttcaagctcgacaaagccatgagccacggcccggacaccctggtgctgggtggacgctacgggcgcaccctggatgattcggatgtggtgatttcaagcttcctgctggggggcgcgcggcagctctcaggcttccgccaggatgcgatctcggggcagaacatcagcctgatgcgggcggtgtactaccgcaggctcacgcctcgctcgtacttgccgctggatttcccgctgtacctgggtgcgtcactggagcgcggccgggcatggaacaacgacaatgaattcgacagcggctatatcaatgcggcgagtatcttcctggggttcgatacgccgttggggccgctgaacttcagctatgggttcaacgatgataaccagaaggcggtgtatctgaacctggggcagacgttttagcgttttgctcagaacccgattgcgtagagcggcgctgttgtggcgagcgggcttgccccgcgctggggtgcgcagcggccccaaaaacagacgactgatttctaactgaaaaaacgcggtgactttagtggggctgcttcgcagcccaacgcggggcaagcccgcttaccacaacagccctactcaccacagtaagacagcacagtggtttcttcaggacttttccagattcgccaggatgtgcccatgcacgcgcatgcacacgctcaagtcggcttcgtctacccccacaaacagttcgtggcgcagggcggtggcgatggtttcgatttgttcgatcaagggccgggcggtatcacacagcacgatgcgcttggcacgacggtcttccaccacggcctggcgttgcaccaggccttggccttcgaggctgtccagcaggcgagccagtgtcggcccttcgacaccaacgctttgcgccagctcacgctgggtgggtgcctcttcaaaacgagccaagtgcagcagaaccagccagcgcgcttgggataaaccaagccccgccaaacggcggtccagctcggcgcgccacccacgggacatttgcgccagctgcatgccaaaacgatgttgatcggttaacgacataaaaaactcaatgtttagactgaaaataaagtgtggctaattattagtcagctaagcatgagctttgcccgtaggcaagagttgctatgtactgattcgttacattgtcgtaattggcacactaaatttcgaattcggactgcaaagccgcgcgcacgcagtacaaaaccccctctggaacacgcccggtgaacagcggcgctatctccgcaacaggtggcaattcgccctctccgtcgaggaacgcatcctggatttcgccgagcagatcctccggtaaatcaagggcttgctccaacgacaattgctgcttgccgatggattcggcaagcaaggtgtagacgtttttttctgaacattgcagctgaccggcgatctgcatcggggtcatgccggcgcgtgccaggctgatcagttcgtggcggatatcagcgacctccttcggcgcttcggcctggccgccgagcacttcgaggaacgcctggccgtaacgctccaacttgcgcgcacccacgccgctgacccgcgccatctcggccatggtggtgggttgttcgcgcaacatttccaacagcgtcgagtcggggaaaatgacgtacggcggcacgctgtgttcctgtgccagtttgcgccgcagggtgcgcaaagcttcccactgctcgcgctcctcgccacgcaccagttggctggcctgactggtgctggtcttggcggtggtctgcggcttgaggtcgcggcgcaactccaggctgacctcacccttgagcaacggccggcaactgtcattcaagcgaaggccgccgaagccttcgatatcgatgtccactaggccgcgcgcaaccatctgtcggaacaacgagcgccactcgccttctgcgcgggccttgccgacgccatacaccgaaagtttctcgtggccaaagctgcgcactttctcgttgtccttgcccagcaagacatccaccaagtggcccacgccataacgctgaccggtgcggtagatggcggacaagccctggcgcgccggctcggtggcatcccaggtctgcacgccatcgacgcagttatcgcaatgaccgcaaggttcgggcatgtcttcatcgaaatatgccagcagggtctggcgccggcagcgggtttcctcgcacagcgagagcatcgcgtcgagcttgtgctgttccaggcgcttgtgacgctcgtcgccctcggagttctgcagcatctgcttgagcatcaccacgtcctgcaggccatagaccatccaggcatccgccggcaggccatcacggccggcgcgaccggtttcctggtagtacgcctcgagggatttgggcaggtccatgtgcgccacgaagcgcacgttggatttgtcgatgcccatgccgaacgcgatggtggccaccatgatcaggccttcctcgttgaggaaacgcttctggtgcgccgaacgcgtttcgttgggcaggccggcgtggtacggcaacgccgggtagccttgctcgcagaggaatgcggcgacttcatcgactttcttgcgcgacaggcaataaacgatgcccgcatcgctgcgccgttcggagagaaacgccagcaactgcttgcgcggctgttccttgggcacgatgcgatagaagatattcggtcggtcgaagcttgagaggaagcgctcagcgttctgcagatgcaggcgctcgacgatttcttcgcgggtgcgcttgtcggcagtcgcggtcaacgcaatgcgcggcacatcgggaaacagctccgccaactggccgagttgcaggtactcgcggcggaagtcatggccccattgcgatacgcagtgggcttcgtcgatggcgaacagggcgatttccaggctctgcaaaaacgccagcatgcgcggctgtaccaggcgctcgggcgccagatagagcatcttcacttcaccgcgcttgatgcgagcggccaggtcacgctgctgttcggcactgagggtagaattcaacgatgcggcggcgacacccagctcttccagggttgccacctggtcgtccatcaatgcaatcaaaggcgataccaccaccgccaagccattgcgcaacagtgccggcacctggaaacacaaggacttgccgccaccggtaggcatcaggaccagtgcgtcaccgccactggccacgcgctcaatgatcgcaccctggcggccacgaaaactgtcgtagccgaagatgtccttgaggacgcgttgagcctgctcgagcatgtaaaactccaaaatggtgccgaaatccctctgtacaggctggccgaaaaaacacgctttcacgggaaataatccgtaagcgaagttttcgcgggctggcgcttggcctgcaagggcatcacaaaacgcggcagtatacccgagcgatccccggcaaagggcatcactgacgaatagcggccgcgatctaaaatgccgtgcggctggcctgggcgctcaagaaagcctagaattcagcatcgtttattcccaaggtaactcttcaatgtccttcgctgagcaactaacccgcctgcaagccttcctcgacgccgatgagctgcatgacgaggcgctggactacgtggccgcccacggctacctgaccgccttgtcgatctgctccgaggtcgtgcctgaccgtgaatggatcgatgcgctgttcgccgaagagccgcactacaccgacgccgcccaacgcgaagaaatcgaagccaccctgctggccctcaaggcccacatcggtcgccaactggcctccgacgaagagttcgagctgccgtgcgaactggaccttggcgaagagccggatgattccgacctgcgcggctggtgcattggcttcatggaaggcgtgttcctgcgtgaagccgcctggttcgaaaccgccgaggaagaagtcagcgaaatgctgctgccgatcatggtcggttcgggtctgttcgacgaccagccggagttctccgacatcgccgccgacgccaacctgatggacgacatgatcgtgcagatcccggaagccctcaccgcgctgtacctgctgtgcaacgcccctgacgaaaagccggcgatcctcaagccacgtcaccactgagtcgcttgcccgtgacacccatgggcaaccgtccgctgctcctgcgctacctgctgctggccattggttggttgagcgtagcgctgggggtgatcggcattttcctaccggtattgccgaccacgcccttcctgctgctcgccgccgcctgcttcgcccgaagctccccacgtttctaccactggttggtgcagcacccgcgccttggcccgtggatccgtgattacctggacggcaacggcatcccgctcaaaggcaaggtctacgccatcggcttgatgtggctgagcatcggcgtgtcctgctatttagtgccattaccgtgggcgcgcggcttcatgctgaccagcgccgtgctggtgacaatctacatcctgcgccagaaaaccctgccaccgcgctgaatgacctgcgacattcgatcccacacgaccttggtcgacactgactaaccccaagcatcatgcgagactgtccaaccgggcctggaatgcccgggtgttcctatgctcggagttaccatgtcgctgtccagcgggctgatcgccgccgttgccctggcctatatggccattatgtttgccatcgccttctacggagaccgccgccgtgcgccactgccgccgcgcatgcgtgcctgggtgtacagcctgtcgctggcggtttactgcaccagttggaccttctttggcgccgtaggccaggccgccgaacagctgtgggcgtttttaccgatctacctgggaccggtgctgctgctggtcctggcaccctgggtgctgcagaagatgattctgatcagcaagcaggaaaacatcacctccatcgccgacttcattgccgcgcgctatggcaaatcccaatcgctggcggtggtggtcgcactcatctgcctagtcggcgtattgccctatatcgccctgcagctcaaaggcatcgtgctcggggtgaacctgttgatcggcgctggggccgacaccaccggcacccgcgcccaggacaccgcgctgatcgtgtcgctggtgctggcactgttcaccatcgtatttggtacgcgcaacctcgacgcgacggagcaccaccgtggcatggtgctggcgattgcgtttgaatcgctggtcaagctgttcgcgtttctggcggtgggcgcgtttgtgacctacggcctgtacgacggtttcggcgatttgttcagccaagccatgctggcaccacgcctggaggagttctggaaggagaccgtcaactggccgtcgatggtggtgcagaccggcgtggcgatgatggcgatcatctgcctgcctcggcagtttcatgtcacggtggtggaaaacatcgaccctcaggacctgcgcctggccaaatgggtgttccccgcctacctgattctggccgcactgtttgtagtaccgatcgccttgggcggcaagatgatgctgccgggctcggtgctgccagactcctacgtaatcagcctgcccatggccgaagcccatccggcgctggcggtactggcctttatcggcggtgcctcggcggccaccggcatggtgatcgtggcaagcatcgccttgtcgaccatggtctccaacgacatgctgctaccgtggttgctgcgccgctccagcgccgagcgcccgttcgaagtgttccgccactggatgctgtcggtacgccgggtcagcatcgtgatcatcctgttgctggcctacgtcagttaccgcctgctgggctcgtccgccagcctggcaaccatcggtcagatcgcctttgccgccgtgacccagctggcaccggcgatgctcggcgcgctgtattggaagcaggccaaccgacgcggcgtatttgccgggctggcagcgggcactttcctgtggttctacaccttggtcctaccggtaacggcgaaaagcctgggctggtccctcagccttttcccaggactgacgtggatgcattcccacccactgggtctgtccgtcacttcgttgaccttgggtaccgtgttttctctggcaggtaacttcacgctgttcgtatgggtatcgatgctgtcgcgtacgcgggtttccgaacactggcaagccgggcgttttattggccaggaaatcagccaacgcgccagcgcccgctcgatgctatcggtgcagatcagtgatttgctcagcctggccgcgcgctttgtgggtgaagaacgcgcccagcagagttttatccgcttcgcctatcgccagggcaaaggcttcaaccccaaccagaatgccgacaacgactggatcgcgcacaccgagcgcttgctggctggcgtactcggggcgtcctcgacccgcgcagtggtgaaagccgccattgaagggcgcgaaatgcagctggaggacgtcgtacgcatcgccgacgaagcatcggaagtgctgcagttcaaccgcgcattgctgcaaggcgctatcgagaacatcacccagggcatcagcgtggtcgaccagtccctcaagctggtggcctggaaccggcgttacctggagctgttcaactacccggacggactgatcagcgtcggccggccgattgccgacatcatccgctacaacgccgaacgtgggttgtgcgggccaggtgaggccgaagtgcacgtggcgcgacgcctgcactggatgcgccagggtcgcgcgcacacctctgaacgcttgtttcccaatggtcgtgtgatcgagctgatcggcaacccgatgcccggcggcggcttcgtgatgagtttcaccgacatcaccgcgttccgtgaagccgagcaggccctcaccgaggccaacgaaggcctggaacaacgggtgaccgagcgcacccacgaactgtcgcagctgaacgtggcgctcaccgacgccaagggcgtggccgagtccgccagccagtcgaagacgcggttcctggcggcggtcagccatgacctgatgcaaccgctgaatgccgcacgcctgttctccgccgccctctcccaccagaacgacggcctgtccgacgaggcccggcaattggtgcagcacctggacagctcactgcgttccgccgaagacctgatcagcgacctgctggatatctcgcgcctggaaaacggcaagatcaacccacagcgccagccttttgtgcttaacgaactgttcgacaccctgggcgccgagttcaaggcgctggcccaggagcaaggtctgcgcttccgcctgcgcggcagtcgtttgcgcgtggacagcgacatcaagttgctccgcaggattctgcagaactttcttaccaacgccttccgctatgccgacggcccggtgctgctcggcgtacgccgacgcaaaggcgagctgtgcctggaagtatgggaccgtggcccggggatcccgctggataaacaaaaggtgatcttcgaagagttcaagcgcctggacagccaccagacccgcgccgagaaaggcctggggctgggcctggcgatcgccgacggcctttgccgcgtgctgggccaccgcctgagtgtgcgttcatggcccggcaagggcagcgtcttcagcgtgcgcgtgccgctggcccgcaaccaggccagcccgcaggtcaagacgccgcaggaaaccggcttgccgctgagcggtgcgcaggtgctgtgcgtggataacgaagagagcatcctgatcggcatgcgcagcttgttgacgcgctggggctgcgaagtctggaccgccaccgaccaggcgcaatgcgcggcattgctggctgatggcgtgcgccctcaattggcgctggtggactaccacctggaccatggcgaaaccggtactgaactgatgggttggctgcgcgcgcaattggcggagccgattcccggtgtggtgatcagtgctgacggtcgcccggagatggtggccgaggtgcatgcggcggggttggattacctggccaagccggtgaagccggcggccttgagggcgttgctgagccggcacctgccgttgtaggagacggcaagccggcgcctacaattactcgggcagatgggccacgccatcggagtcggtcatcgcccgctccagcagatcagcgggaaggctcttactggctcgagcaccgagcaacctcaattgctcagtccggctgaccagatttccgcgtccatctgtcagcttgttacgcgctgcgctgtaagccttatccaactgctgtaaacggttacccacttcatccaggtcctggataaacaacacgaacttgtcgtagagccaaccggcgcgctcggcaatttcccgggcgttctggctctggcgctcctgcttccacaggctgtcgatcacacgcagggtggccagcaacgtggtcgggctgacgatcacgatatggcggtcgaaggcttcctggaacaggttcggctcggcctgcaacgcagcggaaaacgctgcttcaataggcacgaacagcaacacgaaatccaggctgtgcaggccttccagacgtttgtaatccttgctcgccagacctttgacgtgattgcgcagcgacagtacgtgctgtttcagggccgcctggccgatgacctcatcatccgccgccacgtattgttggtacgcggtgaggctgaccttggagtccaccaccacctgcttgtcaccgggcaacatgatcagcacgtccggctggaagcgctcgccatccgggcccttgaggctaacctgggtctggtactcacggcctttttccaggcccgcatgctccagcacccgctcaagaatcagctcgccccagttgccttgggttttctggcccttcaaagcacgggtcaggttggtggcttcgtccgacagacgcaggttcagttgctgcaggcgctccagctctttagccagggaaaaacgttcgcgggcctcgttctggtagctttcttccacgcgtttttcgaaggactggatgcgctctttcaacggatcaagcaattggcccaggcgctcctggctggtttcggcgaagcgctgttcgcgctcatcgaagatcttgccggccagctcggcgaactgcgcgcgcagctcatcccgtgagccttgcaggtcagtgaggcgctgttgatggctgtcctgttgttcgcgcagttcggcgcgcaaggccgctgacagagcgtcgaggcggcgcagctcggtctccttggcgctgcggtcgaggttccaggcgtgggcggcgtcgcgggcattgtcgcggtcgatctgcagcagttcgacttcgcggcgtacggccgccaggtcggcctgtttggcagcattcgcctggctcagatcgctgatctcgtcgcggctggcatccaactgtgcggcgaggccctcctgggccagttgcgcagtggccaggcgctcttcgagcagctcccagccggtcatgcgcgcggtcagtcgccgctgaagctgccagcacagcgccaataaaggcacggcagcgcctgcgaggcccagggcaatactggtccagtcaaaaaccatagacatgtctgccatcaccgaaaaaaagcaaggttagcggagcccagggcctgaggacagctcagtcttcgacctggcccagttcacgctgggcgcgacggtcaccggcgcgagccgccaggcgcaacaggtcgtggccgatgcggcggtcacgggcattcccgcactcacggcacatcagttggcccaggcggctttgggcagcgaccacgccttcacgggcgggctgcttgagcaagcgcccggcaaagtgtttgatgttggtgttatgacccaggcgcggactgtcgagcagccacaaggcaactttcaaggagaagcgcttgggggcggtaacagtttgaggggtatcggtaacagaaggtgatactgagcgaaacttcataaagcactgtgggacagatcggaaggcgcgccactctactctttttttcgtacaggtaaagctgaaaaaactctgcacgcccgttctagagcaagcgctcgggacaatccacagaagctgtggataactcagtggacaacccccctttaactcgcgcaaagccccatggaatgggggtcgcagtcaaactgacgattttttcaccaataaaaaaaagccagatttttcattgacttaaatttccattgcaggcaaatggcggcccggtagagcagttgacagcgcggttacacctcccacaactaatgtgcacaagtacccatccgacggttatatcgctggcgttttttgaagcaacttgctgcaaagatgttaccgccggggcaaaacagggacttttcaaatctttcctggctcgccacactccccgacctacagcgcaacggtggaggggtcgatgaaaggaattctgttgttcgcggtgctgctcctggccatctgcgccatttcattggggatcaatgcggcactgccctctccggatggggcactgttcgccatcgccatcctgctgtcggcggcgttcacggctgtgagcttgtgcattgagctcggcgaaggccggatcaacgatatgggtgatgtgatgaaagtggtcgagaccggccagtccctgcgcttgaccctcgccgcctatggcctgggttgctcgctggcagcagcagccactgtgctggtctatcgaggcctgctgggcagctgattgaagttttttggctaacccacttcccttacctgtttcaatccgttactatccgcggcgttagtaccaagctgaaagtcaattctggtcgaacaattcccctgcacaacacgggatcgaccacctcgatggtttccaggtatcacttgcgacgacactgcctttgaacaagcaaagggtgccgcgaagtttccatactctgaccgaaccaacctgcaaattgatcaggatcttcaccctgggcccagaacctttgcccctgttgtgttgcctgccctcctaagtacctacctgccagcccaagcgcgcctaacttaatagcgcttcaaactggctgctttgttccagtcgggttcttcgtttgatcaatggtgatcaacgttactggaacgttttaatacggcacggatcttatttcgtgtcatttgtaggaacacccataatatgaacgctcaaatccacactcaggatgccattcgcaccctaaccaacgcttttgctccaatgaactgcctgatcatggctgcgcgcaaaggctgcttcagcttcaccctggtcaacgaacacggcattgctcgtcacagcgaacgcctgtaccccgatcaatactccagcgcagaaccgctgcaggccgtgatcgagcgtacccgtcaggcattgaccgcctgaccgacccgagtcgctgaaacacaaaaaccctgcttgaacagcagggttttttattgcccggaatttaccggctcagctattgcactaagttcaaatagatataaacattataactaaatgaagaagatgttttaaaaacagtcctttacatcgtaaatatgacactacacttcaactcaagcggcatgatccgcttccggcgagcctgagatccgatccactgctgccaagcccccaccttctcaggcttcgtcgaccactttcacggattgaggcgtgtatgggtatcgctgccagcgaattgtgtcgttatgtgatcaggccgacgttgatgtacctcggccgacataacccgacggccgagtccctgctgctgggcatcgccgccagccagtcggaactgggttccgccttgcacgaccggcgtggccacggcctgtacagcatcaccgaaccgcgccaccgtgccttgtgggacagctacctggcgctggaccccgagcgcgccagcctggtacgcggcctcgctagccaacacgcgttcctcagcgcaccgcaacttgagctcacggtcaacctgcgttacgccaccgccatcgcctggctcctggtggaacagcacacccctgcactgcccccgcccggtgatgtgctggccatggcacgtatctggaaagaaatttttcatccacaaggaaggctgcgcgatttcactcaagcctggcaaacctgtgtttcacccatgaatcaggtggtttgctgaccgggcaatttgcaagattcgccaaaaaaccaggattttggtcggattgtcctacaaaaccgctctatctcctgcattacagcctatagcgcgatgttaaatttattgttactttccgcagcggtgatcaccacggagttctaataatgaaaaaagtaatgctcaagaccacacttagcctcgccgttgccatggcctcttcccacgtgttcgcaagtggctttgcccttaacgaacaagacgtcgcaggaatgggaacgggtttcgcaggccgctcttcttctgccgaaaatgcaagtaccgtttatggtaaccctgccggtatggctcgccttgaaggccagcaagtcactggcggtgttgcagcgattgatgcctcaagcaacatcaaggatgtcagcggccgctccacaggcacgaacaaaggcgatatggtgcctttcactgccgttccttttgggttctacaccaataaactcaacgaacaatgggctgtcggtttcggcgtctatgctccgtttggcctggtgacagactacgaaagtggcttccaaggcaaagcttttggcagcaaaagcgaagtgacggtcatcaccttccagcctacggtgagctacgccttcaacgatcgggtttccattggttttggcccgactatcaaccgtatcgctggtacgctcgagtccgatatcaacctaccagtccctggtaccggcgccaacaacatcaagatcaagggagatgacaccgccgtcggcttcaatgccggcctgctggttcaagccactgatacaactcgcgtgggcctgacctaccactcgaaagtgaaatacaagctcgaaggccatactgaagtgaccaaaggcaccaacgttccggctgcgctgctgaacaatggccgctacgacgcgtcgctgaagatcgacacgcctgaatcctgggacctctcggttactcaagacatgagcgacgcgtggaaactctacgcaggcgctacatggacccgttggagccgactgaaagacattaccgtcaacaacgaaggtgtatcggccgcagccggtagcggtgctttggctccgcaaattgtcggcaccatcaaagaagaccagaactggcacgacacttgggcctatgccttgggtacctcgtatcgcgtcaccaagcaagtggtgctgcgtaccggcctgaccttcgaccagtcgcctaccaacaacaaagaccgttcgccacgtatcccaaccggcgaccggactatcttcagtctcggccttggttacgatgtaatgccgaacatgaccgttgatctggcttactcctacctcaaggaagaaccagtcaaggtcgctcgcgccaacgcattgggccagtcctacaatgctaagtacgagaacagcgccaatggttttggcctgggcgtaacgtacaagttctgatctgacaccgtatgaaaaagccccgctctcctgcaaaggaagcggggctttttaatggctggccctcaaggtttggaggcgatcgcctgctccaccgccttgatcagatccggactgtccggcttggtcaaactggagaaattggcaatcaccttgccctgccgatccaccacgtacttgtagaaattccacttcggcggtgtgtcggtctgctgtgccagtaccttgaacaggtgcaccgcgtccggccccttgaccttctgcggttcggtcatggtgaaggtcacgccgtaattcacgtagcagaccttggcagtctcttcgccggtcttggcttcctgcttgaagtcatcggacggcacgccgatcacttccaacccttggcccttgtaacgttgatacaaggcttcaaggcctttgaactgtggggcgaacccgcagaagctggcggtgttgacgatgaccaggggcttgccggcaaagcgctggcacaggtcgatggattccttggcgcgcagcttgggcaactggccttccagcagcggcgggcaactggcggccagggcggcactgccaatggccatcaggacgggtacagcgagccaacgcatctgcatgtcgtgtgtccttgaaagtaatcaaaccaccaacttaacagatcgacatacccagttgcatcaacgccagcccgccatgctgccagccccaccaggccagcagcaccaggatcagccccgcaacgaggatcacaccgcgtaacgctacattcatgccgcctccatctgcgcctgcaagcgcgccaccggccgctcacgtaccggccagttaagggcggcggcgagcaggctcaacagaatcgccacctgccagatcaaatcgtagttaccggttcgatcatagaccaccccgcccagccagccacccaggaacgaacccaactggtggaacaggaacacgatgccaccgagcatggagaggtttcgcacaccaaacagtgtcgctacggtaccgttggtcagcggcaccgtggatagccacaggaagcccatcgccatgccaaacaggtaggccgtgatctcggtgaccggtgcccacagaaacagcacgatcaccaccgcacgcagcaggtacaagcccgtcagcaggcgcggtttggacatgcgcccgccgagccagccggcggtgtaggtcccgaagatattgaacagcccaatcagtgccagcaccgtggtgccgacggtggccggcaagtgttggtccaccaggtaggccggcaggtgcacgccgataaacaccacttggaaaccgcagacaaaaaagccgaacgccagcagccagaagccggaatgggagcaggcttccttcaaggcttcccgcagggtttgctgacccgccaccgccggtaatggccgatccttgagcatggcgaccagcggcagaatcaacgccaccatcaggccgagcgccagcagggccgcggaccagcccagccagctgatcaaacccagcgtgcccggcaccatcgcaaactggccgaacgaaccggcagcactcgcgatgcccatcgccatgctgcgtttttccggcgccaccgcgcgacccaccacaccgagaatgaccgagaacgaagtgccggacaggccgataccaatcagcaagcccgcactgagggacaacgaccacgccgaatcggacatgcccatcaacactaggccaacggcgtaaagaacaccgccgacaaacaccgctttggtggcaccaaaacggtcggccagcgcaccggtgaacggctgcgccaggccccagatcaggttctgcagggcaatggcaaaagcaaaggtctcacggccccagccaaattcactgctcatcggcgccaggaacaggccgaaaccgtgacgcacgcccaacgacaacgccaggatcagcgcactccccacaagaatccagccactggtgcgccacatcgaggtcatttcttattctccgctcgcgggtatatacccgcttatattcgaaccaacccgcgctcaggcgagttcgtccagcaaggccaacaaggtttcgcgtttttccgcgcccagttgatcgatcaatttctgttgcgctgcctcccaagcgggtaatgcggcggcaagtcgcgcctcaccctctttggtcaacatcaccaggcgattgcgcaggtcgtcgccttccaccagttgcaccaggccctcgccttccagcacccgcaggttgcgccccagggtgctgcgatccaggcccatggcttccgccaggctggaaatgctcggctggtcgagccgttgcaggttgcacaacaaagaatactgggcgacgttgatcccgaagccgtcgagagcgccgtcgtaatgcctgctgacgccacgggcggcacgtcgcaggttggtacacaaacattgggaggcaagcatggaacgtgtatatacccgcgattaaggaaatgcaagaaagtgttacagcgccaggccgaccaacaccacgacttccagcagttccagcaaggcccctgcggtgtcgccggtggtgccaccgaggcgattgaccatcagttggcgcacacccacaaaggcgatcgccgcgagcaataccgcaaccccgccgctgaagccaccgatcaggatgcaggcaagaccactgaggatcagtacctgttggccgacgatcctcggtaaatgatccgacaatgcctggcccaatccaccggcacgcacgtagcgcgtggtcagaaacaacgccagcatcgatgcccggccgatcagcggggccaggatcagcgcggcgccgttgtgttgttcgatcaacgccaccaacgcggtgaacttgagcagcagcaccaagccaagcgtcaccaccgcaatcggcccgctgcgcgggtccttcatgatggtgagcgtgcgctcgcgatcaccgaagccgcccagccaggcatcggcgctgtccgccaggccgtccaggtgcaggccgccactgagcaatacccaggccgtcagcaacagtgcggcgtgcagcagcaatggcgcgcccatcaataggctgttcagcgcccacaacagcacgccgaacaacaggcccacgaccggataaaacagcagcgaacgccccagctcctgaggctgcggcatgccgggcaggcgaatcggcaggctgctgagaaattgcagggcgatccagaagggcagcatgtctacgccccttccttcagcgtgccgtcagctgcaacttggaggctgaacagcccaccatgaccaacttcgacattcaataactgctcccggggcaaaccacgcgcctgcgccagtaacaggcgcatcacgccgccgtgactgatcaacaacacccgctcaccggcatacgcctgatacaggcgtgagacagcccccataacccgctcggaaaaggcgctgaccggctccccgtccggcggggtaaagctataaggatcggcccagaacaaccccagcccttcggcgtcggtctccatcaaggccgctgcactctgcccttcccaggcaccgaagtgcagttcttgcaggtccttctccagcgtcaccggcagctcgagccgggcgcctaattcttcggcaaatcgcgcgcagcgtcgcaacggcgaactgatcaagcggtcccacggcccctgccccaccacggcctcgcgcatctgcgcccagccgttggcggtgagtgcgtcgtccaggctgccacgcaggccgccgcccagctcggtttcgccatggcgcaacaggtcgaggtgcaaggtcatgccgggcggtctgccacggcggcttcggcaaaggtcgccatctgcccgtgcaatgcacaggccaggcgcaacaacggaaccgccaacgcagcaccactgccttcgcccaggcgcaggcccagttccagcagcggctgcgcgtcgaggtgttgcagcacatgacgatggccaggctcggcgccgcgatgaccgaacaccagccactcacggcacgcagggttcaggcgcgtggcgaccagcgcagcgacggtgcagatgaacccatccaccagcaccacaatgccctcctgagcacaggcgaggtatgcccccaccagcgcagcaatctcgaagccgccgagattgaacagggtctgcaaggcatcaccgcgctgagcggcatgcaccgccagcgcgcgttcgatcacggccactttgtggcttacgccctgggcattcaagccggtgcccggccccgtcaggtcactgacctggcagtcgagcaaggcacacgccagcgcactggcggcggtggtgttgccgatgcccatctcgccgccgataaacagctgtgcaccacctgccaacgcacgccgcgcactgtcacgaccgacttgcagggcgagttgcccctgtgcctgggtcatggccgggccgttgacgaagttggcggtgcccgcgccgatattcaggtgccgcacaccgggaaggtccagggacggggtcaccgtgccgaggtcgaccacttccaactgggcgtccaactgccgcgccaatacgctgatggccgcgccaccgctgacgaagttgtgcagcatctgcccggtgacttcctggggaaacgccgacacgccttcggcaactacgccatggtcaccggcgaagatggcgatccacagcgagtccaccgacggtttgacctggccctgcaagccggccatttgcaccgccagcgcttccaactggccgagggagccggccggtttggtcagttgctgctggcgtgccagggcatgttcgtacgcttgagtgtcaatcgccttgcacgggttgagccaccaggtgtcagtcataacgcagtacctttcaaagtcaggggcaggccggcgacggtcaggacaacacgctgacaccgctcggccaaggcttgatgcagccaaccggcttcatccacatagcggcgagtcaattcgcccagcggcacgacacccagaccggtctcgttgctgacaaaaatgatttcacccggcagcgcggccagggtttccagcagttgatcgcgctcggcggccagacgatccgagtcctcaagcatcagcagattggtgagccacaaggtcaggcaatccaccagcagacagcgctcggttgctgcgttttcacgcagtacacgcgccagttcgacgggttcttcgatcagcccccaatggttggggcgacgctggcgatgcagggcgacgcgctcgttcatctcgccatccaaaggttggctggtggcgatgtacgtgacgggcaaaccgctgtcagttgctagcttttcggcgaggcggcttttgccggaacgggcgccaccgaggatcagttggagcatgacataacacctcgtttggccagtgggaccctcgaagctggcacggttccctgtgggagggagcttgctcccgatggcgtggcgccagtcagcccattggctactgacacaccgccatcgggggcaagccccctcccacctttgggttgcagtgcagcagttgaatactcagcgcattcgctcactgtcaaatcccacatagtttgcgtaacaactcagtatccaagtggttctccaccaagtccgccaggcgctcgatatcgcgctcgcgcagggcgtggtaatccacttcctgcacgtcctgcaaaccggcccagcgcaacagggcgctgcacgcggccgggctttcaaacaagccatgcaagtaggtgccaagaatttgcccatcggcactttgtgcgccatcgctgcggccatcatccagcagcacggcggcattcgacaaagcatcgccgcaggtcacgcccgcatggatctcataaccgctgacctcggcattctccaacaacaaacgcccgcgcacattgcgcaattgcttctcttcttccagcgtggtgctgaacgccagcagccccaggccatcactggaaccggcaagcccttccaggcccaacgggtcgtgcacttgctcgccgagcatctgcaagccgccacaaatgccgagcaccttgccgccatagcgcaagtgacgcgccacggcggtgtcccaaccgttggcacgcagataggccaggtcgctgcgcacacttttcgagccgggcaggatgatcaggtcggcggccgggatcgactggcccggaccaatgaattgcaaatccacctgggggtgcaggcgcagcgggtcgaaatccgtgtggttgctgatgcgcggcaacaccggcaccaccaccttgagcacctgggccgccttgtcgatctggcgttggtcgataccgtcctccgcttcgaggtgcaggtccatcacgtagggcaacacgcccaccaccggtttgccggtgcgcgcttccagccagtccaggcccggctgcaacagcgcgatgtcaccgcgaaaacggttgatgataaagcccttgacccgcgcctgttccgtgggtgacagcagctccagggtgccaaccagatgggcgaataccccaccgcgattgatatcggcgatcagcaacaccgggcaatccaccgcctcggcgaagcccatattggcgatgtcattggcacgcaggttgatttccgccggggagccagcgccttccaccatgaccacgggatagccctggctcaaccgcgcatgggaggccagcaccgcctgcatcgcgatggctttgtagtcgtgataggccacggcgttcatggtggtcacggcacggccgtggatgatcacttgggagccggtgtcgctgttgggcttgagcagcaccgggttcatgtcggtatggggtgccaggttggcggcctgggcctgtactgcctgggcgcggccgatctcgccaccttcggcggtcacggcgctgttgagcgccatgttctgcggtttgaacggcaccacggccacgccctggcgtaccagccagcggcacaatgcggtcaccagcgtgctcttgccggcatcggaggtggtgccctgcaccatcagcgtactcatgttgcgtccttataggcggccagggcttcgtcgaggcgctgccagtcggcctcggtgtcgggcaggccgaaacgcaggctgctgtcgtggacgaacaggcgcagcagaatgccgcgctgggccatgaattcgtgcaaacgctcagcgtggggcgtgatcagccattggaacagcgcgcagccaccgtggggtggaaaaccgtggcgctccagcaacgcgaacaaacgctggcccgcctcgacacaacgcgtgcgttgcagcgcatgcccggccgtgtcgcgcaggcacacttggcccagcacccgcgtcggtccgctgaccgcccaggggccgacctgctcggcgagcaacttgagcaacttgcgctcggccaacgcaaaacccaatcgcacgccggccaggccgaagaatttgccgaacgagcgcagcacgatcaaaccgacctgatgcgcctggctggccaggctcagttgcggggtcacgtccatgaaggcttcgtccaccaccaaccagccgccgcgctgggccagccgcgagtgccaatccagcaagcgttgcgggctcaggctcaggccggtcggattattggggttgaccaccactagtacgtcgaggccatccaggaagaagtcgacttcctgctcctgcacttcgcgcaccacgtaaccggcacggcgccaggcttcggcgtgttcggcatagcacggcgacagcacgccgaccttgcccgcgcgacgcagccgcggcagcaactggatcgccgcctgggaacccggcaccggcaacagatgcgcagcgccatagtattcgctggcggcctgctccaggccgtcgtcggtttccggcaggcgcgcccaggcgcgcaacgggatctcggggatcggccaaggccagggcgcgaggccgctggacaggtcgagccagtcggcttcggctatcccgtattgaatcgcggccttgcgcaaccggccaccgtgctcaagcatagaattgcgcccccgcgcataggatcagcagccacaaccatacgccgcgctgcaccagttgccagccccggtcgatggaatcggcatccgccgccgggccttcgcccagttgcggacgatggtgcacttcaccgtgatagatcgcggcaccgcccaactccacgcccagggcgccggcacccgcggccatgaccggaccggcgttggggctgtcccaggccgggccttggatccgccagcatttaagcgccaggcgcgtcttgcccagcagcgcgtaggtcaacgccaccaggcgtgcgggaatgtagttcagcacgtcgtcgatttttgccgccgcccaaccgaagcgctcaaagcgctcgttgcgataaccccacatggcgtcgagggtgttgctcaggcggtaaagcaccacgcccggcacaccggccaccacaaaccagaaaatcgcagcgaacacagcatcgctgccgttctccagcaccgattcggtagcggcacgggcaacttcggtgcggtccagctcgctggtctggcggctgaccaggtagctcacgcggttgcgcgcctcctccaggtcatcactgcgcagcgcctgggccaccggaatcacatgctcgccgaggctgcgcatgccgagggcgcagtacaacgccaggatctccagcacccagccgatgtacggcgcccacgacaaggccgtggccagcagcgtcagcggcaccacggcgataaaccacgcggtcacgccatggctgcgccagccacggccaccggtattgaaacgctgctcgatgcgcccggcgaaattgccgaacgccaccagcggatgccagcgcctgggttcgcccagcagcgcatccagcgcgactgcagcgacacacagcaaggccacactcattgactcactccccacgcattctcatacaacatgtcactcaacggccgtggttcggtccagccttcgagctgcaacatcggtgccgggtagaactcggccactggtcccaggcacagcacggccaggggtttcgcgccgggcggcaaacccagcagatcggccagcgcctgcggttcgaacaacgagacccagcccatgcccaggccttcgacccgcgccgccagccacaaattctggatagcacaggacaatgacgccatgtccatttccggcagggtgcgacgcccgaagatgtgccgctcgcgatcgtccatcaacgccgccaccagcacttcggcgcagtcgtgaatgccttcgaccttgagcttcatgaactcatcggagcgctcgcccagggcttcggcagtgcgtacgcgttcttcttccaccaattgttgaatctgcccacgcagttggcggtcgctgatgcggacaaagcgccagggctgcatcaggccgacgctgggcgcctggtgtgcggcctggagcaggcggtggagcaattgcggggcgaccgtaccgccgctgaagtggcgcatgtcgcggcgttcggcgatggcacggtagacagcctggcggtcggcctcggggaaggcgttgtcagtcatagtgctgaatcgggcgcaaacaatgcggccaccgcctggggattggatgggaaatagaaatgtacgtaggacgccgtcatccgcccctgccggtataccgcctcggcaccgcgcccgccgttggggctcaggccacgggcgatcggctgccattcagtggtggtcagggaatggtgataggtatggccacgcagggtgccttccggcaattcgacgctttgcagggccagggccgccagtttcttttgcatcaccgcgtcgccctggagcaggccaagcagttcggcgcggacgccgtcgacatcggtcagcgagtccagcaggtagagcatgccgccgcattcggcaagcaagggtttgccggccgcgtggtgagcgcgaatggcgtcgagcatcggggtattttccgacagcgcctggtggtgcaattccgggtagccgccgggcaggtagaggctgtcggcgtcgggcaactggctatcgtgaatcggcgagaagaacgccaactcagcgcccatcgcgcgcagcaggtcgagacttgcaccgtaggtaaaagcgaaggcctcatcgcgggccacggcaatgcgcacgccgttgagcaagggttcggcctcgataacttgcggcgcagcaaatgtcaccggtggcggcaaggcgacttcgcaactgctgcccagggcttgggcggcagcgtccaggcgcacatccaggtcattcagttcgctggcctgcaccaggccgaggtggcgactgggcagttcgataccggtctcgcgtgacaacgcgccataccagcgcaggccctcggtgaggctgccttcgagcagttgcgcatgacgcagggtgccgacccggttggccagtacgccagcgaatggcagatccggctgatagcgcgccaggcccaatgccaacgcaccgaaggtctgcgccatggccgtgccgtcgatcacccccagcaccggcacgccgaagtgccgcgccagatcggcgctggacggtgtgccgtcgaacaggcccatcacgccttcgatcaggatcaggtctgcctcccccgccgcttcccagagcaaacggcgactttcctgcttgcccaccatccacatatccaactgatacaccggcgcaccgctggcgcgctcgtgaatcattgggtcgaggaagtccgggccgcatttgaacacgcgcaccttgcgccccaggttgcgatgcaaacgggcaagcgcggcggtgacggtggttttgccctggccggacgccggagcggcgatcaatacggcagggcaatgacggggctgattcaaagttcgacgcccttctgtgccttgataccggcctggaacgcgtgcttgagcatgcccatctcggtgacggtgtcgcccatttcgatcaactcgggcttggcgccacggccggtgaccaccacgtgttgcatcgggggacgggcttgcaggtcgctgaggacctggtccaggtcaaggtagccgtgcttgagcgcgatgttcagctcgtccagcaccaccaggccgatggaggggtcttgcagcaattcgcgggagaccgcccaggcggcttcggcggcggcgatgtcgcgctggcggtcctgggtttcccaggtgaaaccttcgcccatcacatggaaacgcacttgctcggggaagcggcggaagaacagttcttcaccggtgctgttacgccccttgatgaactgcaccacaccacactgcatgccatggcccatggctcgggccaacatgccgaacgcggagctactcttgcctttgccattgccggtcagcaccagcagcaggccgcattcgttgggggagttggcgatgcgctcgtcgatcacggcttttttgcgcagcatgcgcgccaggtggcgttcgtcgcggtcgggggaatcggtcatggcagctctccgttggggctggacaaaaacggcgggcaggaaaaaaagaacaacagacagccaagcatcgcccaccgtgatgctgttggatgttgcaggccggtctccgggctcatgagtggtgtgcgggttgaaggcaggccaacgctgcgccttcccatatcgcaggcgatacagtggcaaaaagcagcgtcttgactcatttaccgttgcgggggcagcgccggaatcgaggcggcactgtgtagaagtgcgctcactcaccggcttccctgtttcactccgtcgacccgtgggtcacagagcacctggaacaagcggcgaagggtagtaggttgggggtggagcgtcaattaaagcaactgcctcacctgtacttgaagctgccacaaaacaactgtgggagggggcttgcccccgatggcggtggatcagcccattgatcgttagctgacacactgctatcgggggcaagctccctcccacattttgattcgagtctggcgctaaggattgcgtgccaggttgcccggcaacacgcgcttggcgctcaggtaggcattctgccaataggccttggacagtgtatccagcttcaccgtaccgccggtttgtggcgcatgcacaaagcgcccttcacccacgtagatcccggcgtggctgacctgggaaccgccaccggtggcgaagaacagcaggtcaccggtctgcaggttctgctcgctgacgtcctgcgcgcgcattacgatcagctcgcgggtggtacgcggcagggaaatcccggcggcatcgcggaagacaaacccgatcaggccactgcaatcaaacccggagtccggcgtattgccaccccaacgataaggcgtgccgaccaggcccagcgcccggaagagtacgtcttcggccgcaggcgagaaattctgggtggaatagttgaacaccggcttgggcttcaccgctacgggagcgggcggcggtgtgcggcttgcgcaggcgctgaggagcgcggcgcagacaatgagaataaggcgggccgaggtcgacatgtgcagaacaatcctggtctggatgcggctttcgctgccgaacgctgaaaaccagaacgcgcaagcaaagctcgcgcgaacggattacaacaatatccagggattctagcgcttacacgtcaaacttcaagtatcactttaagtttacttgctagcggtaaccgtcgtcggggccatggcgagtgcacgcttggcttcgatgaaggttttgctccagtagctgtcacccaggttatcgacccggacaccaccactgcggcggctgctggagtggataaactggttatcgcccaagtagataccggcgtggctgacacgaccacggcctgccgtactgaagaaaagcagatcaccgggcttgaggttgttgcgtgcgaccaacggtgcattcacgttgatcatttcacgggtggagcgcggcaggttcatgccggcttcttcgcgaaacagatagccgatgaaaccgctgcagtcgaaaccggcttcagaggtaccaccgaaacggtaacgggtaccgatcagggacatgccgcgttcgaggatgctgtcggccaggactggaagctggtaaggcttgttgccggcgaagtcggccagttccttttccgttgcaacttcttcctcataaacagaggcagattgagcagcaacgaattttgcctgattttgaacctgtggtttttgctgatctgccacctgctgagggtgggaggcgcaaccaaacaacagggtaacgagtgcgaggggcacgaggggtgcgaagcgatttagcatgggcacgaccgtggctgatatgtaaagaagtcgagactatgccttctatcacatcgatttgcaaattcaatcgtggtctatgtgacttcttgtttggactatgacatctaagcccttaacaccctgtacctgccttttgcgtggccaaaccggctcaaacgcaggttttctggcgcctgtaatttgccgaaagccgcgaaaacagcgggctagctaccagccgagggtttctttgaggaaggggatggtcagcttgcgctgggcctgcaaggaggcctgatcgagctgttcgagcagatcgaacaatgcgctcatgctgcgggtgcctcgagtaaggataaagtgcccgacctcgtcggtgaggtgcaggccgcgacgggatgcgcgcagttgcagggcacgcaatttgtcttcgtcggacagcgggcgcatctggaagatcagcgccagggtcatgcgcgacttgaggtcggccagcttgatcggcaactcgcggggcgaagtcgacgcggcaatcaacaggcgccgaccgctgtcacgcaagcggttgaacaggtgaaacagcgcttcttcccattccgctttgccggcgatcgcttgcagatcgtccaggcacaccagttcgtattgctcaagatggtcgaagatgccgataccgcggtccatcaactcggccaacggcaggtacaccgccggttcgcccatctgctcgaaccgcaggcacgcggcctgcaacaggtgggtacgccctacgccgtgcttgccccacaggtagatcaggctttcggtccacccggcgtcggcttcgcagagccgctcgacatagccgagtgcagcggcattggcgcctgggtagtagttgatgaaggtggcgtcgtcacgcagacgcacacccaagggcagctgaatcggtttcatgctgactgaacggctccaaacgaaccgttagtggcctctgtgtaaagtttgcaaagtttatacccgtgacgccgggcgcacaatgcaacagaccccaagcaaaatcaaaggtttgcgttaacttgttggatttgtgcagattgtttgacggaccgctcccagaaaagacaaacccggcgttggccgggtttgtgaagaaagggttacaagtcgggatcttcaacccccgtatacgcatccgaatccttgtacagatcgtgcacatggcgcaccagcaccatgatcaccgccgccaccggcaatgccagcaggataccggtgaagccgaacagctcaccgcccgccaggatcgcaaagatcaccgccaccggatgcaggccaatccgatccccgaccagcaacggcgtcagcaccatgccttcaagggcctggccgaccatgaatacggccacgatccccagcatcgggtacaggtcgccgccaaactggaacaagcccgcgaccagcgccgcgccgatcccaatcacaaagcccatataaggtacgatcgcggccaggccggcgatcaggccgatcaacaggcccagttccaggccgatagccatcaagccggccgcgtagatgatccccagggccagcatcaccagcaactgcccgcgcacgaaggcgccgagcacctcatggcattcctcagccagtgaaacaatgcgttcctcacggttgcgcggcagcaggctgcggatcttggccatcatgatgtcccagtcgcgcagcaagtagaacgccaccaccgggatcagcacgaggttggtcagccagccgatcagcgccaggctggacgcagtcgcctggctgaggatgaccccgacgatgtcggtggtctggcccatatgttcgctgatggccgccttgaccttgtcgaacttccagaagccatccgccagccccagcttggcctgggcccatggcatcgccgtgtgctgcagccaatcgagcatctgcggcgccagctcatacaagcggaacaactgcttggccagcatcggcaccaacaccagcaccaacgccgtgatgatcaaggtaaacagggcgaacaccgccaccacgccccaggtccgcgacaacccggccttctccagacgatccaccaccggatcgaacaggtaagccagcagcaacgcgaccaggaacggcgtcaggatcgaatgcagcaggaacacaaaaacgcacagcaggacaaacccgccaagccacacccaacgacgcgtatccgccataaaccactccatctatataaagaagaaaactactaccaacgaaaacgcagttgcgcctgaggttctggggcagcagcaggctgcgcaccctccgccacgggttgctggaccggtgcttcacccgcaggaatttcctgcaacctggccaggctcaactgagtacgcaactgatcggcactgccattgacgcggtacacgatgcgattgccatccactaactgcggctgaccgccgaaaggctccagcagatgacccagcgcggcataacgctcaagggtcatgccctgcacttccagcaattgttcggtgctcacgccgggcttgaccgcaaagcgcggcgccagcttctggctgaccgccagcatcaccgcatcggccacggcgccggtgtcgggcccttgcgccgtgccttgctcacttttgtcgcccagccacagacgccatttggcctgccactggctgccttcctgacgcgcatgcaccgccagcaaggcgtcggcgccgtaacgctcggaggcagcgcgcagcggtgtggcgtcggcactttccagattcggtgcggtggcgaccacctgttcatccaggtcacccagcggcaggcgcaacggcaggcctctgtgttgcgcggcacggcgcagcgcctgggcaacggtctggccatcgcccaccaggctgctgccttcggtggagtcgttcagccaccagccaaggatcgacggccgattgctgccccagatcgacaggcccgcttcccgcagcacgcgatcggtgctcaccgggtcgaaatccacttgcaggctttccggcgggccagcgtcgtagccgtactggctgatgatttgttgcgggtccttgcgaacggccgccaggcccgggccatcggcggccttggcgtcgccggtcaagcggatcaccagggtctgcacggcgcgctgggtcgcctggtcgcgctcttgcggcgactgactgctgacgggctcgagtacttgataaaggccattgagggtttcggcatgactcgccaggctgaccaacgacaaacagcctacaaagaagaacttgaacaaacgcatgaaagattcccgaacgacaaatttagcggctggaacagaccgcgtgaactcggcttggcaaggctgtgaccacagcgaccggtaaaacattcacagggtcctggcagtttttgtactgtcataacgatagcggtttaaaggctataccttaatacgcgccatggcaggggccatcagcattttttaaccggctttttttacctatatggccctgcccgtcggcccgaggatggccgctgcccctcaagcctgataaaatcgcgcgccttcgcagaccgtcaccggctgggccttttaccaaaagcgcctgcccgctcggtcgttacccctgaatcccccctaaaggcctggatcatgagcaagcaaccctccctgagctacaaggacgccggtgtagacatcgacgccggtgaagcattggtcgaacgcatcaagagcgtcgccaagcgcactgcgcgccccgaagtcatgggcggcctgggcggttttggcgccctctgcgaaatcccggccggctacaagcagcctgtcctggtatccggcaccgacggcgtgggcaccaagctgcgcctggcactgaacctgaacaaacacgacaccatcggcatcgacctggttgccatgtgcgtcaacgacctggtggtgtgcggcgccgagccgttgttcttcctcgactactacgccaccggcaagctgaacgtggacaccgcggcacaagtggtcaccggtatcggtgccggttgcgaactgtcgggttgctccctggtcggcggtgaaaccgctgaaatgccaggcatgtacgaaggcgaagactacgacctggccggcttctgcgtcggcgtcgtggaaaaagccgagatcatcgacggctccaaagttgctgccggtgacgccctgctggccctgccgtcctccggcccgcactccaacggttactcgctgatccgcaagatcatcgaagtgtccggtgccgagatcgagaacacccagctcgacggcaagccgctgactgatttgctgatggccccgacccgcatctacgtcaagccactgctcaagctgatcaaggacaccggcgcagtcaaggccatggcccacatcactggcggcggcctgctggacaatatcccgcgcgttctgccaaaaggcgcccaggccatcgttgacgtcgccagctggcagcgtcctgcggtattcgactggttgcaagagaaaggcaacgtcgacgaaaccgaaatgcaccgcgtgttgaactgcggcgtcggcatggtcatctgcgtggctcaggagcacgttgaaaccgcgctgaacgtactgcgcgaagccggcgagcagccttgggtcatcggccagatcgccaccgctgccgaaggcgcggctcaggttgagctgaagaacctcaaggctcattaatgtctcagacctgtgatgtcgtggtgctgctctccggcaccggcagtaacttgcaggccctgatcgacagcacgcgcaccggcgacaacccggtgcgcattgctgcggtgatctccaaccgcagcgacgcctacggcctgcaacgcgccagggacgcgggtatcgacacccgctccctggatcacaaggcgttcgagggccgtgaggccttcgaccgcgccttgatcgaactgatcgacgccttcaaccccaagctcgtggtactcgccggcttcatgcgcatcctcagcgctgacttcgtgcggcattacgccgggcgcctgttgaatatccacccttccctgctgcccaagtacaaaggcatgcacacgcaccagcgtgcgctcgaggccggcgaccgcgagcatggctgcagcgtgcactttgtcaccgaggaactcgatggcgggcctctggtcgtacaggcagtggttccggtagagtctgacgactcggcgcagacgcttgcgcaacgggttcacacccaggaacacaggatttacccgctggccgttcgctggtttgccgaggggcggttgattcttggtgaccagggtgcattattggacggtcagttactcgcggccagcggccacttgattcgaacctaggagattttatgcgtcgcgccttgctcttcgcttttgcgctgttcgccttgccagccgtgcaagcagcagaccttcaccccttctccgtcagctacaccgccgactggaaacagttgcccatgagtggttcggccgaacgcagcctggccaagaacggcgacggctcctggaccttgaatttcaaggcttccatgatgatcgccagcctcaccgaaaccagcgtgatcctgtttgacaaggacaccctgcaaccgaagagctacaccttcgaacgcggtggcctgggcaaggcgaagaagatcaatctggacttcgaccagaccgccaagaaagtcaccgggtttgaaaacaaagacccggtcaacgtgcccctgcaaagcggcatgctcgacaagtcgacctaccagttggccctgcagcgcgacgtggctgccggcaagaagagcatgagctacaacgtggtcgaaggcaccgacgtcgacacctacgacttccgcgtgatcggcccggaaaaggtccagaccaaggtcggctccatcgacgcgatcaaggtcgagcgcgtgcgtgacccgacgcagagcaagcgcatcacccagatgtggtttgccaaggaccagggcggcattctggttgccctgcgccaggtagaaaccgacggcaaggaatacaacatcatgctgcaggacggcaccgttgacggtaaggctgtcaaaggtagctgatcggtagctggaacagagagcctcgcgaatgcggggctttttttcgcctgtcgattgggtttcgcctgacacgaacatgaaacttttgtcataaaactcagggccctgcggcgcaatgtcgcggttttcgcgggctgcagcactgttgcatttaccgcaatgaattgttgcgcgaaaagtcggtttacttagcaagctaacaaatcatataacaaaggcctgcgacgacttgccgcagatccaccagagattggagcaagcagatgactgtaaaagtaactgaacgcgacgacgaacatatgtcccacgaagcactgggccatgggattcacatctgggatgtacaccagcaagacctgttggtcggcatgtttcacaacgagagcgacgctcataattataaaaacgagctcgaagcccttgagatgagacgccagtcagaaagctcctgaagataccttgtagtgagcgggcttgccccgcactgggtggcgaagccgccccactaaaaacgccgcattctttctgggagaatgcggcgtttggttttcagggtcggccctttcaaggtctttaggtagaacaggcgatgagtaccctgtggcaagcccgctcgccacaacaagcctgctcactacaattaaggctgcagccttaccacatcaggtcatccgggatctggtaggcggcgtacggatcatcctcatccggcacctggctttccgtcaggatattgagctggacgatacgctccggtgcgcgctcctggattttcagcgccgcttcacgcgggatcacctcataaccgccgccgtggtgcacgatcgccagggagccgttgctcagcttgttgcgcatcagcgtgttgaccgacaggcgcttgaccttcttgtcgtccacgaagttgtaatagtcctcggtggtcagcttgggcaggcgcgaggtctcgatcagttgcttgacctgggccgtgcgggccttggcctcggctttttcctgctgctggcggttcagttcctggtcgcgcttgaccttctcggcctgcgcttcagccgccaggcgggcctgggtgtcgtctgcctcgatctggcctttatgaaccaggcgctgctgtttctgtttctctttgccgacctgcttggcctgcttttggttgaccagacctgctttgagcaactggtcgcgaagggaaaggctcatggtgcttactcacttaggcaactgctcaaccgcagctggacacattcttttcctgacgtttggcttcgccccacagggcgtccatcgtttcgagggtgcaatcttctatggattggtgcgtatcgcgcaatgcctgttcgataaatcggaagcgtcgctcgaacttggcattggcgccacgcagcgcggtttccgggtcgaccttgaggtgacgggccaggttgaccgccgcgaacagcagatcaccgacctcatcggcaatcgccgcagaatcgttgtcggccatggcttcgagcacttcatcgagctcttcgcgcacgttatccaccaccggcagggccgacggccaatcgaagccaacctggctggcgcgcttctgcaatttggcggcgcgggacagggacggcagcgccgtgggcacgtcatccagcagggagagttgctccggcgcgtcggacttttccgcacgctcctcagccttgatctgctcccagcgctctttgacctgttcttcactcagctgtgggatatccagcggcgcatacaggtcgccggtgggaaacacgtggggatgacgacggatcagcttgcgcgtgatgctgtcgatcaccccggcgaattcgaagcgcccttcttctcgcgccaactggctgtaatacaccacctggaacaacaggtcgcccagctcaccctgcaggtgatcgaagtcgccgcgctcgatggcatcggcgacttcgtaggcctcttccaacgtgtgcgggacgatggtggcgtaggtttgcttgatgtcccacgggcacccgtattgcgggtgccgcaggcggttcatcaggtgcagcaggtcttcgagcgaatacatcatggggtacggttacgccgcgtctcgatgatattcggcaactgggaaatccgccccagcaaccgccccagtgcgtccaaccccggaatctcgatggtcagggacatcagcgcggtgttgtcctctttgttcgagcgggtattgaccgccagcacgttgatccgctcattgagcagcacctgcgacacgtcacgcagcaacccggaacggtcgtaggcacggatgacgatgtccaccgggtaagtgagcaccggcaccggcccccaactgacctggatgatccgctccggctcacgcccgcccagttgcagcaccgaggcgcaatcctggcggtgaatgctcacgccgcggccctgggtgatatagccgacgatggcgtcccccggcagcggctggcagcagccggcaatttgggtcatcaggttgcccacgccctggatctggatatcgccacgcttgccgggcttgtagccggtggccttgcgcgggatcagttccagctgttcgctgccgcgttccggctcgaccagttgctgggccaggttgaccagttgggccaggcgcaaatcgccggcaccgagggcggcgaacatgtcttcggcaatcttcatgttggccttttcggccagcttgtcgaagtccacctggggtaggcccaggcgcgccaattcgcgctcgagcaaggttttaccggcagcgacgttctggtcgcgcgcctgcaatttgaaccagtggacgatcttcgcccgcgcccgcgacgtggtgatgtagcccaggttcgggttcagccagtcgcggctcggcgtgccgtgcttgctggtgatgatctcgacctgctcaccggtctgcaggctgtagttgagcggcacgatgcggccgttgatcttggcgccccggcagttgtggccgatctcggtgtgcacgcggtaggcgaagtccagcggcgtggcgcccttgggcaagtcgatggcatggccgtccggggtgaagatatagacccggtccggctcgatatccacgcgcagctgttcggccaggccgccgatgtcgccgagttcttcgtgccattccagtacttggcgcagccaggagattttctcttcgtactggttggaccccgcctttacgtcggtgcccttgtagcgccagtgcgcacatacacccagctcggcctcttcgtgcatggcgtgggtgcggatctgcacttccagcaccttgccctcggggccgatcaccgccgtgtgcaacgagcgatagccgttttccttggggttggcgatgtagtcgtcgaactccttggggatgtgccgccacagggtgtggacgatgcccagcgcggtgtagcagtcgcgcatttccggcaccagcacgcgcaccgcacgcacgtcgtagatctggctgaaggccaggcccttgcgctgcattttgcgccagatggaatagatgtgtttggcgcggccgctgatgtcggcttcgacgccggtggcctgcaattcggagcgcagctggttcatcacgtcggcgataaagcgctcgcggtcgagccgccgctcatgcagcaacgtggcgatctgtttgtattgatcgggttcgaggtagcggaaggacaagtcttccagctcccacttgatatggccgatgcccaggcggtgcgccagcggcgcatagatgtcgaagacctcgcgggcgacgcggttgcgcttctcgtcgtcggcggtcttcaccgcacggatcgcgcaagtacgctcggccagcttgatcagggcgacgcgcacgtcatcgaccatcgccaccagcatcttgcgcaggttctcgacctggccctgggtgcccagcaccatggactggcgcgggctgaggctggcactgatcgcggccatgcgcagcacgccgtcgatcagcttggccaccacggtgccgaaacgctggctgacggtgggcaacgggatatgcccttcacgcacgccgcgatagagcacggcggcgatcagcgaatcctggtccagcttgagatcggcgaggatctcggcgatttccaacccggtgcgaaagctggaagtgccttcggcccacaggttcttggccgcattgtcttgctgctcggactcacgagcgaactcgcaggcggctttcaaggcttcacggtccagtgccgggtcgacactgatggcatggtccagccatgcctcgagattgatactgccgtcggtgttgatcggctggtgtgctctcacctgtaccatcttgcttaccttccctacgacgcaccttcgatgcgccaaaatcatcgccgacgtttactgcgaactccctggcagatcacaggccctggagaacgcaggccagtcggattaaacgggcatcctagcccgcttcaaataacgccatggcctcgacatgcgcggtttgcggaaacatgtcgaggatcccggcacgttttagccggtagccttgcttgaccaactcaaccgtgtcccgcgccagcgtggccgggttgcaggacacatacaccagacgcttggcgcccaaggtcgcaagcttgcgcacaacctctagggcaccgtcacggggtgggtccaagagtaccgcagaaaagccctgtttggcccattctgcgtcaatcaaaggctgggacaaatcggcctgaaaaaactgcgcattatgcaaatcgttgctgacggcattcacggccgcccggtccaccatggtctgcacaccttccaccgccaccacttcacgcacctggcgcgccagtggcagggcgaaattgcccaggccgcaaaacaggtccagcacccgttcgtcgggttgtggcgccagccattcgagggcctgggcgaccatcgccgcgttgacgccggcgttgacctgcacgaagtctcctggccggtaagccagctccagattccactgttccagttgaaagcccaacacagcatcggtgtcgaccggctccggctggccctcgccatgcagccacaattgagcctcatggaaagtgcagaattctctcaacacctgcaggtccgcttcggacaacggcgccatatgccgcagcaacaccgcaacggatgtaccgctgaacaattccacatgccccagggcctggggtttgctcaggcggcgcagcatgttcggcaggcgctgcatgatcggttgcaaggcctgtaccagcaccgggcaatcatcgatggcgacgatgtcctggctggccacggcgcgaaaaccgacgtccaggtgtttcgccttggcatcccaacgcaccgccacgcgggcgcggcgacggtagccgaattccggcccgctcaacggcgcggcccactcttgcggttcgacaccggccacgcgggacagttgctcggcgagcatgcgctgtttcagggcaagctgttcggtgtggggcaggtgctgcacgctgcaaccgccacaacgaccaacgtgcgcgcacggtgccgggcgacgcagttcgctggccttgaagacgcgctcggtgcgtgcctcgacgattttgccgtgggcacccagcactcgcgcctcgacttcttcgccagccagcgcgccgttcacaaaccaggtgcggccctcgaagaacacgatgccacggccatcattggccaggcgctcgatggtcaggcgttgtttcttgcccaccggaatctgcggggcccggctgccgcccgtcggttggaagcgcaggcctctctcgtgcttggccatcagttgggttcgtcgaagatgccggtcgacaggtagcggtcgcctcggtcacagatgatcgcgacgatcaccgcgttttccacttctttggacaggcgcaacatgcccgccaccgcgccaccggaagacacgccgcagaagatgccttcttcacgcgccaggcggcgggtggtgtcttcggcctcgcgctgggccatgtcgatgatgcggtccacacgcgtggcgttgtagatcttcggcagatactcctcgggccaacggcggatccccgggatggccgaaccttccatcggttgcaggccgacgatctggatcgccgggttctgctccttgaggtagcgcgagttgcccatgatggtgccggtggtgcccatggagctgacgaagtgggtgatggtgccctgggtctggcgccagatttccgggccggtgctggtgtagtgcgcctcggggttgtcgccattggcgaactggtccagcaccaggccacggccttcggcggccatgcgctcggcgaggtcgcgcgcgccttccatgccttcttcctgggtgaccagcaccaactgggcgccataggccgtcatcgccgccttgcgctcggcgctgccgttgtcgggcatgatcaggatcatcttgtagcccttgatcgcggcggccatggccagggcgatcccggtgttacccgaggtggcctcgatcagcgtgtcgccgggcttgatctgcccgcgcaactcggcgcgggtgatcatcgacagcgccgggcggtccttcacggaaccggccgggttattcccttcgagcttgagcagcagggtattactggtttcacccgccatgcgttgcaagcggaccaggggcgtgttgccgacgcaatcggcgattgtagggtactgcaaggtcatggcgtattcgcaatccagactgcggggcgcacatcataccgggaaaggctggcgggccatatcacgcaaagtgtggtgcttattgctttagggtataagcacgagaaatcatccgatcacgaacgctgtccattcctggtgggtaaggtcccgaatccgcttgttttcggctgatgcccttgcgtcccgcacgccattgagacgattcacgtactgcccttcactgatcaagccactcgccagttgttgatcagcaacctccaatagcttctggaaacggcggagcctgaattcgagatctgcggcatatttatgttgaataaaatgcacccagaaaggctccttctgtaacaactcaggccagttcgttcccgtctcattattcagtacagccgtgcgcacggtattgaccgaatggacatccggcacagccgcctcaaaacgctgagggagtacttgcggcaaattcaggctcgatgccagggcgatgcgataactcaggacccgtgtgcacgcgaatgccatgccctggggctcaaagtgcctggaaagatactgatctatgtattcaagacgacgtcgtgcacggtagtaatgcaacagatttggcccggcagtttgtacgccggcatcgagtatccgtagcggagctatttgcaactcaagttgatgtaagcacaacaggcaaccatcaatccctccgcgaagggtgcgataacacggtaagtaagcaattcgctccacgccctcatgggacatcgcatcgtcaatcactccccagactcggtgtgaaatgatctccctcatcacacggtggtgggggtcaatgaactgcgggtaatcggcaatgcttgccagcaactcaaagaaataatccgccattggctggttttgcaagtacgcccaatcgagttggcgcgcttgtacttctccaggagggagcagcgccaaccagcggtcgggacgctgatcaaaaggaaccgtcggttcccataatccgaaatcaacatcgggggggccacgacgctcgcccactcggcgtaacaactgtcgcgcctgcgcggaaagcggattacctctcaagttcattccctgatggacttcgggataaatgaacaagtccgtctcggccaggtcctgtatttgattgtcacgcaggtcaaagctgcccaacgtggagagactcaccgcaccgcgcggtaattggctcaacgcgcaattgcgcaggttcagctcccgcaggttcgtcaacctatacacgttcaagcgtcgtccttgcccaagtgggtttcccgacaaatcaaggcttctgagttccgtcagctcagccagtcgttcctcgtccacatagttgaaccgcaggtggttgttcgacagattgagcactgccaggcgcgcgtggaggtccagattgggcagatgagtgagtcgattaccattgagatagagaagacgcagcgccggaaagctgaaaagaaagcgctccggcaacgtcgtcagtcggttgtttctcacgctcagcatagtcacatgagcaaagtgcgcgcgcagggtcggcaagcttgccaaatccagatcgtccaggttgagttcctcggccactccctgagtgaaaccttccttggcccagcaacgctgaatccgctcaaccgccaaggctcgtgaacgggccgatgcgcggtccggctggactgtcgacgcctgatcccgccatgtttgcaagtccctgtacagccgatcacgctccttgacctgatagttgatcaagtcttctcgctctttgaccgtgtcgtgcgcctccgcaagcatcgcccacacctcggcatccgttttaaaggggtacaactcgcgcatgcgcttgatctggttacgctctgtcggcccgaattcggttccaccactgagtgggtagcctttgcgaccattgatcaggcgtggtggtgcgagcctcgatggcattggccgcatgttgagtgtcgattggattcccgaccaatcctgtcccaggcgggctcccatttccgcgcgcaattcctccagcgcgccggcatgggtgtagcccatcgcctgccgctcggccaggggcaatgcgccgagcaaggcctccaggaacggcgcgcgtgcccccaccgcctgcaagctaccatctgcccgttggacgtaggccaggtactgtccgacgctcggtttcaagacccgtcgaaggtcagcatcatcgggaccgacgctgtcgattacgcggtgggcatcccagagttcaacccgcagcgatgtcggccagcccttgagaccagccagttcatggagcatcaaccgagaactgtcgtcattcgccaacggcgacaggtgcacgccttccagggcaccacagacccgcaaccaacgggaccaccaccgcgcctcatgcgccaaggtgtgcggtacgcgcccctcccggaggcgctccaactcagacgcagaagcatgttgcacccagtcctgcgcaatccccacggtcaatccagggaactgacgcactatcacctgtaccaaagggtcatcggaccgctggttcttgcggcgcagcacatcgaaaaactgcgcgtgcatctgcagtttgtccatgtgcaccttgctctccagggccgcaacctgatcttcacgtgcaagacccgccttaccgaccaacgcatcggcattgtcaggcgttatttcatcgagcacctggacaataaactccgaccccatctccagtccttgcttgacccgctcaaagatattcaagcgttcgaacgtctccaccaaaagcaccggcggcggttcgctgcgcatatgcaccttgcgcagtatgtccggcgtcacgccgctgatctgctggaccttgtcgatggcatcgggggtcaatgtgcgaaacctgggacccaggcggtaaaagggtttatgcccgttccaggtcagcgggttctcccattcatgccgccacgcgcccgcgccgttatggctcagcagcggcgcatacgcgtcgtccagggccggatggcggatgcgccaggggcgggtttgatcctcctgggtcactttgaaatattggctatcgatgaacaaatagcggtccgactccagagagtacaaccccaaggcatcgggctcgggtgcaatgcgccgggtgtcgacgtcactcgcgtactgcgcgatgtcgcgcagcaccgggtagaacgtgccttgcggtgcacgattgcgcagcatcgcctgggccacttgatgacgaaacccagtgatggccgcgggcatatcggcgccgaaccgggcgcgatcgtgatcggagagttggctcagtagcacccggaaaaacgcatgcgcgccaccctgctgcacgccggcgccctggctgcccggatcatagggcgaaaactccccatcaccatggtcgaggatcaacacggcatgcttgtcacgatccaggggagcgtaggttgacgggcggacaatcagttgcttgccgatagtcctcaaggcactgcgggcaaacgcctggacccaggcctgggtttgcggatcaaacctgcggcggtggtagatgcggtcaatgagggcctcggcacgcgccatctgcgcggcaaccttgagcgcatcgtagagcggctcgggttgttgtcggacttcaagcaaacgggtttgctggtcggccgacagcggatgctgatccagcacctccagcaacctcggcaggctgacgccggggtgcaatacgcgcagcgcctcgatcacctcgggcaccgggtagtcatgcccaaggctgtcaggcaaccatttacatacggacaccgaagcgcggatagcgctcgagcgatgggtgtcggcaaaccgggtcaaggcttcgaacagatcgaaccgcgacgcctgggcctgggccgccagttgcaaacggaccgcctgttcgccggcggaaaaactcgagggtaaaagttgtaccaccgcgtcggacaggtgcgcggtgatgcgctgcggtgcagagtagccaaactggtggttctccagggcggtaaccgtgatcacaaccgtcgtcgggcgggtcgcatccctgctgtagcgacgtagctcctggccctgtgtgttgacgattctcaacgccgtgtccagcggccacgccggcagctgggtcagcaacgggcccaggacttcgaatgcccccatgggcactggccggttggaatcgaccgagttggcggcccagtcaatcagccggtcggcgttgaaccgatgcgccgcctccaccaacgaggctgatgggcgtgcgcctgcccagacacgttccaattgttcgcgtgatgtgccgctggtttccagcaaggcctgcagctcatgcgcaggcgcctgggagggcagcaacatgcgctcaagcaactgggggctactcagccccgtactgtccttgatgctggcggcgggcatttgcgaaaggcgttgatacaaggcttgatggcgccgccgtacactgaatgccaggcggctatgcagccgcccgctgatcagcaggtcggccaagtcggaaaaggccagcaccagttcacctgcatgcccctccagcacactggacaagccattgagcaacccttcacccagcgccacgaacaacgcgatcgcccttacacgcgccaaccccttgagcgggccgggaaccggcatcagcaatagctccagcacctcgccaatcacagtgcgcgcaataccggcaagggtcgtcagaacccccggcgtctcgttggccaggctcttcaggttagtgcgaatgcgcgccaggtggaggtcgcccaaactgacggggggggctttggtcacgaccttgcgggtatagccggtccggtcctccaggcgaggctcgaacacctcgagaaacagatcctgtaatgcctcggcaaaaggattaagcccgctttcacggatggcgccttgcctgagcctggtcaagcgtgcgctgtcgggctgtgacatgaccgcgtataaccacgccacccggccctgccggtagaaagcactgaacgccacataaaattcctggcaggcttcccggtggttgtcgaaatgacgcaggtcgcccccgcccggccgacggggaaagtaactgaacgcgcctttgcaaccatcaacggaaaacaccagatgggggatgttcaggctgtctcccggcggcctgctgagtatttgcccggtgttgccgataaattgaggcacccaaccgatgttgtccttgccgtcggggatgaacagctgcatttcctcgcagtgcccccacccctcctgctgctccagcgcttgcttgatagcgcggtatttttcccggtcgactcgggtggtgttcgagtctctcagggcttcaatcagggcgaactcaaactccagccgccccagtctcacaatcgcctggcccaacggcttggccttgtccaggttgtcgtcgagcagggttctgagttggccaccgagattgagctcgcgcaccaacgcgatgaaatcctcggggctgaggtcgatactgagcctgctggacattgccacgccgtcatggccggggtaatcccaacccgtcaggccgtcatagttcatgcaggcggcgtcccacagcgaaagccggacgaccttgggctcattggtacggtctgccaggtcgcgccgatgtcgacgagggccgaacgaataggtggtggtgatatgctgggctttggggtcaacctcttgaccggtgaggtctttgaggcccgttcgcaaacgctccaggctttggagttcaaactgtgtgacgaattgacgaacgtttcgttcgacctccgcctgggcctcgatcaacgcccgttgcaggcgtacatattcgcgctggccatcgtcatccagcccggccatgaaagcggcaaatttctcctgcaaggcgtccacggtttgcagggtcgcccactcgtcgcctgcgaccaagggcagcctcgctcgctgctccgccatgaacgccgccaacggatctgcctgctgctgtgtcgctaccggctcaatcatttcacgctccttgaaatgatcagcctatccactacccgtcgatggctccggtagctatgtagcgcattgattcagccatggttcttttcgaataccgctgcgcccatcgccgcgatctgcccctcgatcaacgcgtcgaacggccgcaacaatggctcgaaggaggtgggagcctccaatacctgcagggcctgcgcaatcgcctcgacggtggacaacgcacctggcgagggagccttgcgcagtcgataacgtgacacggcgtcgcccgccaatgtcacccggggcagcactgccagcaacgggttgaggtgcaacaacttgcgcgccttgcgccaggtgccgtcgggcaccaccagcaacagcggggtgtcgtccggcgcatagtgctgcaaaggttgtgcatcgtccgccggaaacaacagccgcgcctgataaccgggtggggtcaacaatgtcgccagatcgtcaaacacctcccccaccaccaactgcgcgttgttcaagcccagcgccgccagcctcgcggtgttcagcgcgtggttgacctcacttgggtgctgcaacagcagcacgcgggtgcggctgtcgaggctggggatcagcgcgcacaggcaatgggtgacgggccgtaggcagcgggaacattggggtctggacatggtgttatcaggcctggttgagctgggctttgagtagatcgcggaaagtctggatcaacggttcacggctgcgaccacggcgcatgatcatcgaaaacggcgcctggtagccgaaggtcgccggcagcaacacgcgcaaatcgcctttgtcggcccaggcctgggcatagtgctcgggcaggtagccgatgtaggcgccggacagcaccaggatcagttgcgcctccatactttccaccgttgccgcgctgtgcttgaagccatggcgcgccagttcggcctggctccagtagccgcgcccgaccatgcgttgctgggtgatgacttgctcgggaatacgccgctcgttgaataaagggtgacgggtgctgcaatacagccagtgctgctcgcggtacagcggcatgtagatcagcccgctcatgcggttggagaaggcgccgatggccaggtccaggcggttgtcctgcacgccgagttgcagctcgtagggactcatcaccgacaaatgcaggtgcaccgccgggtgctccaggctgtaggcgccgatgacttcggcgaatggcaaagccttgtcgctgacagtggagtcgagcacgcccaatttgagggtgccgcgcaactcgcctttcaacgcggcggcgtattgctcgaagccttccagttcaccgagcaggcgcaaggtctcctgatggaacagctcgcctttgctggtcaggctgaacccgccgcggccgcgatggcacagcaccaggcccaacgccgattccagctggctcatataggtgctgatggccgaggtggacaagttgagttcgtgctgggcattggcgaacccctggtgacgcacgacgctgacgaagatgcgcaggagtttcaggtcgggcaaggcgttggccatgggcggctccagaggcacacacaaaatcctgtgggagggagcaagccccctcccacatttaaacgcagtttaccccaggcattagtttagaaaaatctgaactaagtatttgcccctgccgattctttcgtttcccggtatttcgcagaatcaggccctaataaacaaaacaacgatgaggcactcccgtggacaagattttccaccaaccactgggcggcaacgaaatgccgcgctttgccggcatcgccaccatgatgcgacttccccacctgcaaaccgccaagggcctggacgctgccttcatcggcgtgcccctggacatcggcacctcgctgcgcgccggcacccgcttcgggccgcgtgaaatccgcgccgaatccgtgatgatccgcccctacaacatggccaccggcgctgcaccgttcgactcgctgtcggtggcggacatcggcgacgtggcgatcaacaccttcaacctgctcgacgccgtgcgcatcatcgaagaagcctacgacgagatcctcgaacacgacgtgatcccgatgaccctgggtggcgaccacaccatcaccctgccgatcctgcgcgcgatccacaagaaacacggcaaggtcgggctggtgcacatcgatgcccacgccgatgtgaacgaccatatgttcggcgagaaaatcgcccacggcaccaccttccgccgcgccgtggaagaaggcctgctggactgcgaccgcgtggtgcagatcggcctgcgcgcccagggctacaccgccgaagacttcaactggagccgcaagcaaggcttccgcgtggtccaggccgaagaatgctggcaccactccctcgcaccgctgatggccgaagtgcgtgaaaaggtcggcggcggcccggtgtacctgagcttcgacatcgacggcatcgacccagcctgggcaccgggcaccggcaccccggaaatcggcgggctgaccaccatccaggcaatcgagatcatccgtggctgccagggcctcgacctgattggttgtgatctggtagaagtttcgccgccctatgacaccaccggcaacacctcgttgctgggcgccaacctgctgtacgaaatgctctgcgtattgccgggcgtggcgcaccgctgatgagcacgcacgaggtgctgcaagccgctgccgagctggtggcggccttcgcccgcaatgaccgcgccgcctacttcggcgcgttcacggccgatgccagctttgtgttctacaccctcccccagccgctgctcagccgcgatgcctaccaggcgttgtgggacagctggcgtcgggacgaggggttcgaggtgctgtcgtgcacctcgagcaacgccgtggtcagcctgcagggcgacgtggcgatatttatccatgacgtggccaccgagctgcgcatgaacggggagcaattcaaaagccaggaacgcgagaccattgtcttcacacggcaaggatctggcgcacaacaaaaacaaggccggtggctggcctgtcacgaacatttgtccgctatgccggaagggctgccgcccccttagccaatgtgatcggagctgatcatgaataataaaaacaacgataaaagtattcgaaaaatagaaaccaacggggtcgagcagatcccggaccacgaacgtaccgccggccccaaggatctgttccgactgatcttcggcggtgccaatacctttgccaccgccgtgctgggctccttccccgtgctgtttggcctgtcattccaggccggcgtctgggcgattgtgctgggcgtgctggtgggtgcgctgatcctggcgcccatgggcctgttcgggccgatcaatggcaccaacaacgctgtgtcttccggtgcgcactttggtgtgcacgggcggatcgtcggctcgtttctgtcgctgctgacggcgattgccttcttctcactgtcggtgtggagttcgggtgatgcgctggtgggcggtgcgaaacgtctgatcggcctgccggaaaccgacctgaccctggggctggcctacggggtgttcgccattctggtgctgacggtgtgcatctacggctttcgcttcatgctgtgggtcaaccgcattgcggtgtgggcggcgagcctgttgttcctgctgggtatcttcgccttcgcgccggctttcgacagccacttcgcaggcaccgtcgcgctggggcagaccggcttctgggccgccttcatcggcgctgcactggtggccatgagcaacccgatttccttcggggcgttcctcggcgactggtcgcgctacatcccgcgtgaaacaccgaaaatgcgcatcatgctggcggtggtcctggcacaaatcgcgacgttgatcccgttcctgttcggcctggccacggcgactatcgtggcgatcaaggcaccggactacatcgcggcgaataactacgtcggcggcttgctggcggtggcaccgacctggttcttcctgccggtgtgcctgatcgcggtgatcggcggcatgtccaccggcaccacctcgctgtatggcaccgggttggatatgtccagtgtgttcccgcgcctgctgtcacgggtcaaggccaccttgctgattggggtgatgtcgattgccttcatctttatcggacgtttcgccgccaacctggtgcagagcgtgtcgaccttcgccgtgctgatcatcacctgcaccacgccgtggatggtgatgatgatcatcggcctgatcgtgcgtcgcggcttttactgcccggatgacctgcaggtattcacccgtggagaaaccggcgggcgctactggttcagccatggttggaactggcgcgggctgggggcgtggatcccgagtgcgctggtgggcctgtgcttcgtcaacctgccggggcagtttgtcgggccactgggcaacctggccgacggcatcgatatcagcctgccggtgacgctggggctggcgtcggtggtgtacctgaccttgctacgcatgttcccggaaccggcggccgtctacgggcccgccgaccctcgcagcaagcgcacggatgcgcgcgttaaaccggcgctgcaaccagccgcctgatcgcccataaaaacgataatcggagactcgccgtcatggctttggatttattcgtcgtactcatctacgccgccggcatgctcgtgctcggctactacggcatgcgccgcgccaagacccacgaagactacctggtggccgggcgcaacctgggcccgtcgctgtacatgggcaccatggccgccacggtattgggcggtgcgtccaccgtcggcaccgtgcgtctgggctacgtacatggcatctccggcttctggctgtgtgccgcgctgggcatgggcatcattgcgctgaacctgttcctggccaagccactgttgaaactgaagatcttcaccgtgacccaggtcctggaaaaacgctacaaccccatggcccgccaggccagtgcggtaattatgctggcctacgcgctgatgatcggcgtgacctcgatcctggccatcggcaccgtgttgcaagtgttgttcggcctgccattctggatttcggtgctgctcggcggtggcgtggtggtggtgtactcgaccatcggcggcatgtggtcgctgaccctgaccgacatcgtgcagttcgtgatcaagactgtcggcctgatgtttatcctgctgccgatctgcctgtaccgcgtcggcggctgggatgagttggtcgccaagctgccggcgtcgagcttcagcttcaccgccatcggctgggacacgatcatcacctacttcatgatctacttcttcggcatcctgatcggccaggacatctggcagcgggtgttcaccgcccgtgacgaaaaggtcgcccagtacgcgggcaccttcgccggtttctactgcatcctctacggcctggcctgtgcgctgatcggcatggccgcgcacgtgctgatcccggacctggacaacgtcaacaatgcgtttgccgctatcgtcaaagcctcgctgccagacggcatccgtggcctggtgattgccgccgcactggccgcgatgatgtccactgccagcgccggcctgctcgctgcctccaccgtactgaccgaagacctgctgccgcgcctgcgtggcggcaaacagtcgagcctagccgtcaatcgcctgttcacaatgctgaccggcatcgccgtgctgggcatcgccctggtggtgagcgatgtgatcagcgccctgacgctggcctacaacctgctggtgggcggcatgttgattccgctgatcggtgcgatcttctggaagcgcgctaccacctctggcgcgatcacctccatgaccttgggctttgtcaccgcgctggtgttcatgatcaaggatgggctggatgcgaacacgccgatctactacagcctggcggtggggctggtgagctttgtggtggtgagtttgttgtcgcgtcggccagaaggtgtagcggccagcgcggtttgagaaaaagcgggttttagaggggtttcttcagcgggcgcgacgtcggatgtcgcgcccgtttttttcactcaaccgccaggttctggtttgcctggatgatctcctggaccagggaggcccataccagtccttgggttgtgccgccggcgtaggcttctccggctgctacttggtgatgggcgcaacagtgaactatcgaagttccgtcctcctcactggctataacgacgaagtgccccctgctctgctcggcgatctgaacccgactcagaaactgtgacggaaaccgaaccccggagcctctcaaaagcgcctcgatctccttcttcaaatggataagttccaggccgtagcccggaacctcaacatccctagcccgcgcgaatggtgcgagcgtcgggttgtcagccagaaacttttcaaacagctcgatacctgcacgattgcactcaacggccaaatacggatcggcataactggcgccatcgctcttctgatctcccccatacacggtgacctgataattcgccaaccggagcattacggcctggaacaggccattgatgcctctgccgataatcgatacacgcggcgcactggaatctaccggcagagaagggagcgtcaatgattgtgcaagtttacgcctgaccagaccgcgcaaggccgtcaaactcagctgtattgaaacggcatagtcaaggtcgcgctggcaggcctcggtggttgatgcctgggtagtgagcgtcgcaggcctgtaccaggtggagacctcgcagccgagcgtctgcgtgcgttgccggaacgcatccaatgtcgcaggcccataatccaataccagctggatatgttcagcctcggccagggcatgcaacgcaccgtcgctgaagacgtccggcttggcgacacagatcaggcgggcttggctgtgcaggcactgaatgcgggcctgatcaaggcgatgaacggactcatcattgagggatacgcacactgccacagcagcggcgccctccaaggcctcgaaccagtccacgacaaatgacactcgactgtcggaagcggcattcccgagagtatccggcgctcgacctggccggaccagcactctgatccgaacatttggatctcgatcaagcaacaggttgaccagttctttccccacattgccgtatcccagtacacgcacgtcacggggaatggaaccatcagccagtctcagccaacgcaggatataggcggccacatgcggcgcattcacccctggggtgttgagtacttgaatggcgtgggattcacacaggtccagtcgtatcttgtccaaactcgtacccctgcggatcaaacagaggtttccaaaggggtgggaggtacgccattgctccaggacatctgcatcgatgggttggtctccaacaatgatggttgttggacgcaggagcgcgatctgtatcagcagcgcctgcctggtcaatgccggcgaaagaaacacgacgtttctgggtgcctcggccttccagcttttcgacacaggcgcagcctgtaaaacacagtcggtggtggtgatgagtgacgcggcgaccggaggaactgaagagagcaacatagctttgtctccaacaactctgactgacacctcgaaaagaggcactcaataacgttggggcgctatgaagaggcgcttgagtttcaagctatgggtatttctggaattggataagccagccgtttccgagtgacaggtagtccgattccgacaatcgaacgccaagggctgaccggcagacccacagcgcttgctcactcctccccgctgctgagacctttaaacaaatcaacacaatccttacagccgaaatattgctcgactgccgggcattcgatctcccctgtcgcccccgccctcacccgccacacacacgccttgccatgatatttcagtgtgccttcaaggtaacaaggcgcccagtcgtactcgtcatgcagcgtgcctccatcaatgggctcagcacgcttgaaaaaggacgcgacctgtcgctcatccagcgcaacgtcactgggtcgacagcgttccggctcttcggagtaaaagcccaaaagggcaatttcgtcgatatcgggaggggaagtcgtgcatccggcgaggaatacccacacgccaagtgaccatcggcgcagactcattgccacaccgcactgctggcttcgccggggtgtttgtaagagatttgcggatgcctgtagacgtcctccggcgtcaggcggaaatgaccatataactcccccaccagccatcgcagagattgactctgcatcgcggtcacttcctcataacgtgcagcatccagatgcttgccgaccaattcgatgcccagggaatccgcattcatcgggaatcgctcaggatagcccttggtgcgttcataccgatccagcgcgcggatctgcaaggtccaggtgagtgcttgaatagcttggattcgggcggggtcgcacgtcgccttgtccgttgccatgcacctggagcgcaggtagcggccaacgtgataacaacgtttcttgaggctggccgtctggtagatcacaccatttttctcaatgagaaagtgtgctccgttgccttttgcaagataggcgttaaaggtgtgctgggcggtcggggcatctgtctggtgaatcaccagcgcgctcacgctgcgcaaatccccgtgctcgatcgattgaaaccgacggagttcgactctgtcggcaatcaacatcccttcgctatcaatactcgacatgccactgcccattcatccatgtgaaggcaaaaatatagaaggacaaacagggaaaagggcatggatgacgggataagaagaaggctctgacgatgacacgtgcctcgtcagacaattgggcacactacccaatgaacgggaatacagtctgattacagggaaccgaacacgccctgaagaacaacccagccatgagcgcccgcgcgattcaatcgcgtgagcgcttcaggacttacctgcgacgtggacgacgctgctcgtcatctgtgcgaatcggtaccggctgcagcggaggctcgatcaagcccaatgcaacacccaggtcatggagccagttttgaattttctctttcatggttgccccctttgagggtaatgcgggtaggcgcaagttctgtcgccctttcctacagtgatagtagccctaagtcctacgtattgcttgaacgaaaacacaacgaactattactgaattcatcaaaatcctgccggatcgctcaagcaatggcgcgggtgtcttgcacaaccgcagccttgccggcttgctgcaggtcgatccatgcgttgaggttagcgccgagcataccctttcgccacatcagccaggtggtcgcagtggcaaaaggccctatcagcggatgaacggacacgctgtccttgccgggcaggctgtcgagcatggactcggacatcaacgccacacccgatccggcgatcacgcaggcgagcataccttggtaagactcgatctcgatcgcccgccccatggccacgcgctcgtgggaaaaccaggtctccaggcgggtgcgataggcgcagctgcgacggaaggtgaacactgaacgccccgccacatcctgaggtccacgcacgggcggatgatcggcttcgcaaatcagcaccaggcgctcttcgcacaaggcgatgccgtccagggaggcgatggtgatgggaccgtccacaaaggccgcgtccaggcgaccggtgatcaacccttcgagcaactccccgctgggcgccgattgcacctgaaggttcaccatcggataagccttgtgatagcccgccagcaacttcggcaaatgcaccgcggccgtgctgtacatgctgcccaatacaaaatcgccagccggttgcccaccttgcacggcaccgtgggcttcgtcatgcagggcgagcagacgggtgctgtagtccagcagcaccttgccggcaggagaaagctgcaagcgttggcgctcacgcacgaacagctctacgccgagctgctcctccatttgcttgaggcgcgtcgacaggttggacggcacccgatgcaagcggtcagccgcacgggtaatggagccctcttccgccacggcctggaaaatgcgcaattgactgaactccatgactttctccaaaactgaacaagttactcactattattcaattttacagaaagtcaatccgtcttagcctgagggtattcgcttacctgcaggaaacctgaccatgtctcccctgattcgcttaactgccagctttgtcgccttgatgatggcgatgggtattggccgcttcgccctcaccccgcaaatgccgcacctgctcagcgaagggcagatcgacttgactggtgcgggcctgatcgccgccgccaattatctgggctacttcgtgggcgcggtggattcgatcttcgcgcgcagccatcaccacgtgcgtggccgtttgtatggcgggttgtggctgtgcgtgctgctgaccctggcgtcgtactgggcccatggtttctggccgcatctgttgctgcgctttggcaccggtgtcgcgagtgcctgggcattggtgatgatcaccagcctgagccagccgctggcgatcgccgccgggcgtccacgtctgggtgccttggtgttcgccgggccggggctggggattctgttgacggggctgctggcgctgggctccaacctgttggggcaaagctcggcaacgctgtggctggtgtacggcgtcgtggcactgctgatgttgctggcgattctgccgttcctgcccaagccttctgccgccggcgctcccattgccagccatagcgagacgggcagcaacggcagcatcgcgcatttgtgctggatctacgtgttgtacggtctgggctacatcatcccggcgacattcctgtcgcagatggccagcgcacagttcaagggcgcctggcaggctgacctgttctggccgtgcttcggcctggcggccgcgatcggtgtggtggtggcgaccctgcgccgcaaggacccgaacaccacgcgccgctggttgatggccacgctatggctgcaagcggccggggtgtttgcctgcttgctgggcaatggctggggcctggcactgggggtcctgctgtgtggcgggccgttcctggcctgcatgcagttggtgatggcccggctgcgggacgtcgcgccccatggctaccagcgcagcaccgggctgttgaccgccagctttgccatcggccaattgagcgggccgttgctggcgtcggtcagcagccacttgagcggtggcctgcaaccggcgctggtggtcgctggagcaggcttattggtagcgggctcggtgctgatcaaccggcaaccagcggcgcaggcacacgcacctgttcacgccgcgccagtaccaggaaaaacagcccacccagaaagcacccggtaaaccaggcaaaattggccatgccctgcaaggccggggtgaaagtgatcgccacgcccaccagcgtcgcgggcaccaatgccttgaccgccgtccagttcacgccaccgtcgaagtagtagcgcccgctggggctgtcatcgaacagtgcatccacgtcgatctgctgttttttgatcaaatagaaatccaccagcaggatcccgaacagcggcccgataaacgccgcgaggatgtctagggtgtagtggatcatcagcgggttattgaacaggttccacggggtgatgaagatcgacgccacggcagcgatcatcccgccggcgcgccagctgatcttgctcggcgcgacgttggcgaagtcaaacgccggcgagacgaagttggcgacgatattgataccgatagtcgcggtgacgaaggcaaaggccccgagcaatacggccatgctgttgtcgatgcgcgacacggtggcgatcgggtcatgcagcatttcaccaaacaccggtaaggtgcccgagacaatcaccacagtcaccagggaaaacgccaggaaattcaccggcagcccccagaaattgccgcgtcgtacgtcctgcatgctgcggcagtaacggctgaagtcgccgaaattcaaggtcggcccggagaagtacgacaccaccagcgccgtcgccacaatcacctggccaaacgcctgccagcccgacagggatttttccgccagggtaaagctgatgttcgaccagccggccttccacacgatccaacccgccagtgcaaacatgaccgcgtagaccaccggccctgcccaatctataaaacggcggatggactccatgcccgcccagaacaccgccgcttgcaacacccacaggctgaggaaaccaaaccagccaaggtaggacaggcctgcaaaatgcggctctgcatacaccgccatctgtgggaagaagcgcagcaccacgatgatcaaggcactcgacgccaggtacgtctgaatcccgtaccaggccacggcgatcaagccgcgaatcaccgccggaatattcgcgccgaacacaccaaacgccagccggcagatcaccggataaggcaccgcagcctgctggctcggcttggccaccaggttggcgatcaactgcacgatgcaaatgcccgtgagcaacgcgatcaacacctgccaactggccagccccagggcgaacaggctggcggcgaacacatagccgccgacgctgtgcacgtcgctcatccagaaggcgaagatgttgtaccaagtccacttctgcggcagcgggcccaagtcctggttgtacaggcgcgggctgtagcctttgggcaattgttcggtcatcgctgggctcctcgaaatacccgcctgcgcttccgtcgcagggtgcatacgggaggcggcatggtttgtatacgagacagtcagcagaatgcgtgccaattgaacgcaatccctctggcacggcgctccaaagggttgataagcgcgtatagggtggcgctacgctcagcaacggtgcacgtagatcctgtacacaatcagcggtgcactcgttgtgcacacaggtaacccaccgtgcagcatgcggcggtcaggaacgtcccccatgccatgtccatgatcgccaattgcgcggaccagccttgcagcgtggcccagttactcaggtcataggtgccgtaggcgaccaggccgagcaaggcgcccaggcgcgcggcgcgttgccaacttgcactgggcaagaccacgaacacgacgcaaccgagcacataaaggagatagaacagcgttgccggcaacagccgaggttgatccagcatcagtggacccaacagggacttataggtgggccccatgatgacgccgagccagaggccatccagaatcaggaaggcgagcaacgtgccaaggtaggcgaacagcgttttcttattcattgaggcgacctctgtagacgccaatgggcgcctacagaagagcaaaacgcactcagcttagttcaatgcgatccgcatggatcacgatctggccctgcttatacagcgcaccgatggccttcttgaagttgcccttgctcacgccgaacaagttgctgatcaccgcggggtcgctcttgtcactgaccggcaaggtgccgttgttttcacgcaacttggcgaggatcttcgagttcaggctggaggccgcttcctggccgaccggttgcaggctcaggctgatgttgccgtcggcgcggatctctttgataaagcctttttcttctttgcccgggcgcaggaacttgaacacttcgttcttgtggatcaggccccagtgcttgttgttgatgatcgccttgaagcccatgtccgtggcttcggccaccagcaggtcgacttcctggcccacctggtagttggccggtgtcttgtccaggtagcgatccaggcgcgcggtggcggtgatgcgcttggtgtgcttgtcgaggtagacatgcaccacgcagtattcaccggcggtaagctggcgcttttcttccgaatacggcagcagcagatccttgggcaacccccagtcgaggaacacgccaatactattgacttccaccactttcaaactggcgaattcgccgacttgaactttgggtttttcagtcgtggcgataagtttgtcatcgctgtccagataaatgaaaacattaagccagtcttcatcttcactgggaatatctttggggatataccgattgggcaagaggatttcgccatcttgcgcaccgtccaggtacaaaccaaagttagtgtgtttaaccacttgcaagctgttgtagcgcccgactaaagccatgtccaataccctcattacgtgggcggcattctacccgagttgcgctcgccacgcgcgcgcgcctgaaaaatcgcgggctggcgtggccttccgatggcagtgccccgctcgtccgatcaatcggctgaattttccatggttggcaagcgccacccgcccccatggtttcgagttaaaacagtaagttaggggcttattgataagatgaacttcggcgatttccggccgccgtacttattctcaggggatatttaccaagcaattgtcaagtatttcctgtacgatgcctggccaagttaattttctacaggttagtggccgccatgcgcgtaaaagcatccaacagcaaagcaaagccagctcccgccgttgaaaccagcgagtcgatcaacagccagattgcggcgttcctcaagtccggcggcgaaatccagcaaattgccaagggcgtaagcggccagactttcggcccgtccaagcagatcagcctgggtaaaaagtaataccgcgcaacccccctggtccctaagcgtcttgactctcaaggcgctaggactagagcccgaaataccccttctgtacctctaatcgacgaacgggcctcaccgcctggcattcgccggtatgcttgcacacgtctagcacgggcatctgcccgattttctccgtcactgctcctcgcttttcatggagtgaagcatgttcaaaccctgcatcttcctggtctttgccctggttgccagccctctcgccgaagcgcagatcttccagcgcgaattgggcgacttcgacctgaaattgggcaccacgcctagccgcagtatggcccaaggcctggtcaagccaacctcccccggcagtgactcgttccatggcgggctggacctgagccacgacagtggcctgtacttcggccagttctcaccgaacatgggcttgtcttcgtccagcaacctcgaagtcgattcctacatgggtttcaaacaccccttcgaccagaccctgggctacgaagtgggcctgatccactacagctaccccaagctcagccctctcgacagccaggagttctatggcggtctgaacctgttgggcaaccgcttcggcgcatccttcagcaacgaccctgaccgccaggacagtaccctgttcgccgacctcggtggcacacagccatttggcattggcgtcagcatgaaatacaccacccatcagttgggcaccccggtgtcggtggacggcggctccattcgcagcttcagcgactggtcggtgcaattctcccgggaatggatgggcgttgacctgaacctgatctacagcgactccagcctcagcggcggggattgctcggcctattccggacacaattcgcaatgcgatggcctgttgacgctgaaggccgcacggtcgttttattgatgggctgaactgtcgcacccggcgcaggttcacatgtgatatcccactctgcgaaggacccgccatgctgcgtcggctaaaactactggtgctgttgctgaccctgagcctggtgctcgccggctgcaatcgcgtgggcctggcctaccgcaatctggacgtgatcatcccctggaccctcaacgactacctggacatgaacgccgggcagaagagctggttcaacgacaccctcaagcagcacctggcctggcactgcaccacgcaattgccgggttacctggattggctggaccgcctgcaacagatggccgacgacaaccacgtcaccgacgccgccttgcaggcccgtaccgccgaagccaagcaggccatcgacgacatcgctcgagagatcactccctccgccatccagctgcttcaaggcctggatgatcagcaggtcaaggacatgaacgacgcgctggccaaggacttgcgcaagcgccaggacgaatacctcaagccgcccctggcccagcagatcaaggaacgcgccgagcgcatgagcaagcgcctggacgcctggatcggcccgctcagcgccagccagcagagccgcgtgaccgcgtggtccatcgccctcggcgagcagaaccgggaatggatcggcaatcgcgcccgctggcaggcgcaatttatcgaggctgtgcaacagcgccgcagtgccgatttcccgcagaagatccagcagttactggtggaccgtgaaagcctgtggaccccggagtacagagcggcctacgcccagaccgaagcggcggcgcgcagcctgattgtcgatgtgatggccgaaagtacgctgcaacaacggcagaaactcacccagaaaatcgacaaggtgcgcagtgatttccaggcacttaaatgcttgaagagcacgcagtcctaaccgggcgccaacgtccccagccaagccaccagcgccaggatcaacaccactgcggcagactccaacacaatgctgcggcgcagtgctttgcttgccacggtaatgtcgcccgccgccagggcgcgttgcagcaacggcgtgaagtgcgagcgattgagcgccgccagccccagcatcaaagcgaacaggcccaacttgaaacacaacaggaccgcgtaggtgccaccggtgatgccatcgagcttcggcccgaccacaaacagataattcgccacgcccgtgccgatcagcaccgctacgaacagcatgcccatccgctcgaaagccgccagcgcgtgtgccaacctgtggagcgtcgacaaagacgtgctcctcaacgccaccccgaatgcagccaacgcaccgacccaacccgccgccgccagcaggtgcgcactgtcgctgagaacgtgccataccccctgcgtgccttcatgcatcacgccgtgccccgcccacgccagcgttaccagcgctatcgcaccgaacagcggtgccattcgggtattgagcgcaaccagcgccaacgccaccattcgcaggcaccaggtccaccccagctcggtctgccagagcatcatttgcaggtgcggccacaacatttgccaatcttcggcgccgctcatggcctgggtcatgaacagcaacgacgctaccgaaagcaatccacccaggcacgcagtcagtcgcaacagcgactgcagattcaataggcggcggtcgccatagaggccgaacaaccccaggccgaacaccagcatcaagtccagataaagcgcaaaacgcaggagtatcgagaccgcttcactcatggctggacgctgaacatcacattacccaggatcgggtgcgtatcggacgacaccgcgcgccaatccacccggtaagtacccgccgtcagcgcggacgccggcttgatcagcatcaccttgggatcggtactggccgcgacactggccttcaccggcatcggcgaatggaacatgccgggcatgtcagtcatggtcagtttggcaccggaaaactgcgtcagcaggttttccgagaagcgcagttcgatcacggccggcggcgcccccttggccccatccgatggtgtagacgacagcagcttcggatgagccgataccgccaggctggtaatcagtccggcgcacagcacagtagttttcaacaatgacatgcaaggctccaggccgctcatggcggcgagtaagttataggatgggtaaaaccgtcagaaccacattcgcacaccaaccacccagcgccattggctgatgtcttcgccttcatcccgggcgtattgcgcggtctggccgtagctgcggttccagctgacgcccacgtagggcgcgaactcacggcgcacttcataacgcaacctcaagcccagctcactctccgacaggcccgagccgacgccgcgctgtgggtcgttgcgtccatagaagttgagttcagcggtgggctgcaggatcagccggttggtcagcaggatgtcgtagtcgccttccaggcgagcagcggtacgacccgcctcaccgacaaacaacgtggcttcggcttcgaagttgtacagcgccatgccctgggcgccgaaggccgcccaggtctggccgtcgcctggcttgaagtcctggcgcacgccgcctaccaggtcccaccacgggctgatggcatgcccccacagggcctggacttcggcgctttcagtgcgaccggcactgcgctcgccttcgctgcgtagccacaggcggtcgatatcgccgccgacccagccgttgatatcccagttcagcgcgcctgcaccgtcaccgccctgccattccaattggttgatcagcagcaaagagttgatgccactgtcgtgaaccctgtgcccaccgggggcgttgtacaccgccgcgcgatcagcatcggtcagggcaggaatcggtgtccggctctcggtgagcgccggtgacgccgggctcatgccctggaactcgtcggcctgcaccaacggagcgaacgccagcccgataaaggcgaataaaacacgatggctcatgcttgcgtccttactcatgcacgcgcacctctcggaacatgcccatttccatgtggtacagcaggtggcagtgataggcccagcgccccagcgcatcggcggttacccggtagctgcgccgcgagcccggcggcatgtcgatggtgtgcttgcgcacctggaactggccgttttcatcctccagatcactccacaagccatgcagatgaatgggatggctcatcatggtgtcgttgaccagcaccagccggacccgctcgccataggtcaattgcaagggttcggcgtcggagaacttcacgccattgaacgaccaggcgaacttctccatgtgcccggtgaggtgcagctcaagggtgcggctggggtcgcggccgtcagggtcttcaaaggtgctgcgcaagtcggcgtaagtcaggacacgccggccgttgttgcgcaggccgatgccggggtcgtcgagcttgggcaccgggttcatggcctgcatgtccaccagcgggttgccttgctcgctggccggatgggcctgcatcgacatggcgcggtgatccatgcccgccatgcccgccatgcccgccatgtccggcatatccgccatggcgccgtggtccatgccgcccatgcccatgtcgtccatggtgatccaggggcgcgggtccagcgccggcaccgacgcgattgctcccgcttgaagggccagcgtgccgcgggcgtaaccactgcggtccatcgactgcgcaaacagggtgtaggcggccgcggtaggttcgaccagcacatcaaaggtctccgccacggcaatgcggaactcatcgacactcactggctgcaccggctggccatcggcggcgatcaccgtcattttcagccccgggatgcgcacatcgaaatagctcatcgccgagccgttgatgaagcgcaggcgcagggtctcgcccgcccggaacaggccagtccagttgcgttccggtggctggccgttgagcaggtaggtgtaggtctcgccgctgacgtcggccaggtcggtggggttcatcttcatctgcgcccacatcaggcgatcggcggcggtggccgaccagccctgcttgcccacatcccgcacgaaatcgcccacggtgggtttgtgcaggttgtagtagtcggactgtttcttgagggttttcatcagcgcaaccgggtcttcatcggtccagtccgacagcatcaccacgtagtcacgttggtaagtgaagggctcgggctccctgggatcgatcaccaacgggccatacacgccctgctgctcctgaaaccccgagtggctgtggtaccagtaggtgccgtgctgcttgagcgtgaactggtagacaaacatcccacccggctcgatgcccttgaagctcaagcccggcacaccgtccatggacgacggcaggagaatgccgtgccagtggatcgacgtcggctcggccaggcggttcttcacgcgcacggtgaccgtgtcgccttcgcgccagcgcagcaaggggccaggcaggctgccgttgatagtcagcgcggtacggttgcgaccggtgaggttgactggcatctggtcgatgaacaaatcaaattcggtacccgccagcacggtgggctggccgggactggtgagcgcccagaccgggctgcgccagagccctagcccgctgagcaagccgccggcggccaggcctttgacgaaggttcgtcgggtggttgtggggtgcatgccgattcaattccatgagttgaatggcagcagattaagcacggccggctgtcagccagcttagcggcagattaccgatctgacagtttcgccccggctttgcgacagtgccggggcgtgaaggggatcaggcgatctgcgccttggaggccacctcggcaaaggtcgtcgggtcgagcgcatccgcctgctcgtccagcacctgacgcgggtgatcgttgcccggaatcgaactgtcgatcagcgccagcaactgtgcgccgagcggggtcaggataaaattctcaccattgccgccctcctcttcagggcgcgactcgatgaagccgcgcttgaacaacagcgcttcataatctgccgcggtcttcttgagcgcgtccaggttaccggtgggctcgcccgcggtggccttctcggccgcttcctgctcggcgtatttgcgtggggcgaagctgccctcgccgttctgcacttcatgcagcagacgttcgatcagatcccagttgtaagtcgtcatcctgattcctcctgcaggcgggtggaaaatagcctgtctaggggtgtgacacgccctgtcggtcaccgttcagccggatagacggacgtcatttctctgaactttccagacgttcgcggcctcaacagctcatatccgccaaggaggtgtgcccatgaaaaccctgatgaacctggccgtcgcggccgcgctgtttagcgccctgcccgcctgggcctgtacgcccgacgaagccacgagcaagcgcgagcaattggctcaggaagtgaccaggctgaccgaacagaatccgaccaaggccaaggagatcaacgacgaactgcagaagatggacctggatacggaaagcgcggagttccccgacaaatgccaattgatcgacgcccgcctcaaggaactcaaggaagccgccgccaaagccaaaaactgagggcataaaaaaaccggacaatcgtccggttttttcacatcacccgcgccttagtcggcagccggggcttccggcttgcggcgcttgagcggtgccatgccgtccttgctgacgagcgacaggttgtcggtcttcggccggttggcgatcttgcgtttggtcggcgacttggcgccggttttcttcttgtcgcccttggcgtcggtctttttcttcttcacaccaacggccttgcccgatgccttgaccttcttcggcccggtgtaggtgcctttgacttccttgatggtgcggcgctcgaacgactgcttgaggtagcgctcgatgctcgacatcaggttccagtcgccatggcagatcagcgagatggccaggccatcgttgccggcacgcccggtacggccgatacggtgcacatactcgtcgccgctgcgcggcatgtcgaagttgatcaccaggtccaggccgtccacgtccaggccacgcgcggcaacgtcagtggccaccagaatcttcacgccgccggccttgaggcggtcgatagccagcttgcggtccttctggtctttctcgccgtgcagcacgaacgccttgtactcctgggccaccaggcggccgtagatgcggtcggcggcggcgcgggtgttggtgaacacaatggctttctgataggtctcgttggccagcagccagttgaggatctgctctttatgcacgttgtggtcggcggtgacgatctgctggcgcgtggtcgcgttgaggtcgctgacgttgttgacctgcaggtgctcagggttgttcagcaccttggcgaccatctcgcgcagggtggaaccgccggtggtggcggagaacagcatggtctgctggcggttgacgcattcgcccaccaggcgctgcacgtcgtcggcaaagcccatgtcgagcatgcggtcggcttcgtccagcaccagcacttcgacttccttgaggtcgaggttgccggcgttgagttgctcgatcatgcggcccggggtgccgatcaggatgtccggtaccttgcgcagcatggcggcctggaccttgaagtcttcaccgccggtaatgatgccggacttgatgaaggtgaactgcgagaagcgctccacttctttcaacgtctgctgggccagctcgcgggtcggcagcaggatcagggtcttgatgctgacacgaaccttggccgggccgatcaggcggttcagtacaggcaggacgaacgcggcggtcttaccgctaccggtttgagctgtcacccgcaggtcacgcccttcgagcgcgagcgggatggccgctgcttgcacaggcgtaggctcgacaaatttaagctcggccacggctttgagcaggcgttcgtgcagggcgaattgggaaaacacgggtgctacctcgaagaaatacaaaaaatcagctgcataggttaccggtttcgggcgcccaaaccgagtttctttacgcgaacggtgctaatcggccgcttttttgtcaggacatttgtccacgacgtcaactttgttgcacttaaatgctctaatcgccccgtcttgtcccacagaagaatcggtttcacccatggatatcaaacagctctggctcaacgcccaggacctctggggcgccctcgatgaacacccgctgctgcacgccagcctcggcttgctggtgttgctggtggtggcgctggtgctcggacgagtggcgcgctacctcattctccacgccgtcaaactgcttggccggcaaccgtccctgcactggctcaacgacctgcggcacaacaaagtcttccatcgcctggcccagatgacgccgtcactggtgatccagttcggcctgtacctggtgccggacctgagcaagaccgccatcctgttcatcggtaacgtggccctggcattgagcatcctgttcctggtgctggccatcagcgccctgctcaacgccctgctggacatctacgcccgcaccgaacacgcgcgtacccgctcgatcaagggctacgtgcagttggcgaagatggtgctgttcgtgtttggcgcgatcattatcgtcgccaccctgattgaccgttcaccgctgttgctgctgtcagggcttggcgccatgtcggcggtgatcctgttggtatacaaggacacgctgttgtcgttcgtcgccagcgtgcaattgaccagcaacgacatgctgcgggtcggcgactggatcgagatgcctcaggtcggcgcagacggtgatgtagtcgatatcaccctgcatacggtcaaagtgcagaacttcgacaagaccatcgtctccatccccacctggcgcctgatgtccgaatcgttcaagaactggcgcggcatgcaggcctccggcggacgccgcatcaagcgcagcctgttcatcgacgccagcggcgtgcgcttcctgcgcgacgacgaagaactgcgcatgacccaggtgcacctgctcaccgactacatcgggcgcaaacaggccgaactcaaggcctggaacgaagcccaggggcacagcgcgcaactgtcggccaaccgccgccgtatgaccaacctcggcaccttccgcgcctatgccctggcctacctgaaaagccacccggacatccagccgaacatgacctgcatggtgcgccagatgcagaccactgcccagggtgtgccgctggagatctactgcttcacccgtaccacggcgtgggcggattatgagcgcatccagggggatatctttgattacctgctggcggtgttgccggagtttggcttgagtttgtatcagcagccgagtggtaatgacttgcgtgcgggggtgttgccagcggtgttgggggccagtcacttgcctgcaccagaaaaagccttgagctagaacgcttcatttccagggatgggctgcgtggcctgacgcttcgcagcctccctccagtgactccaatcgatcagtgcagtcggaagtcgatcgtgactttttatccagacacacagacctggatcgatccactgtacgatttccgtgatatcccgatgcagatcgaacagcggttgccacaggagcggctcatgatgaaaacaacgatttcgtagatcccgcgcattgttcagtcgactgcggatgacgtccgctttcttggcgttcttcgggcaatagaaaaataccttcatcaacggcttcgaaacatccgggaacgatttacggttgaacagcgaggtccagaagccaaagctcaactcggcggtaatgtcgtcaggaccagggtccacacctcttttattgagcgccgcacgtgcgtcgtccactttttgatagctggaaagaagctctgcgttagtgcttaccctgaaggcctcgtaccaatcgtcacgcccgtactcgcgtaccatctcgcgctgaatagcattgcgcagccccacttcaagcacgtgaaaaatcgacaccagggactctgcgatccgcatattgtgcacgtaggcagcggcagcgtgctcttggttgccctgatgccccataagatagcggctcattcgtggtgtggagagctttgcctccagtgtttgccagaccattacccgccacctcccttcagcgcaaagacatgtacaagcgcgagcgatggtgcaggcagattttttcgcctgaaataaacacactattgccaaacaatgcagccgacctacatcgatgccaggtggggttgacgtaaaaaccaaggctggtaatctcaccccgcagccctaggaacctccactcccgtgcgagatgaaacggtgacgagactaggttatgtgacggccccgctctgcggggcctcctcatttctggcgatccaacttttcgctacgactcgtttttcaccgcacgactgttcagttgatggcccaaccgactgatccacaccgcccccagaatcaccaacccacccagggccaaccgccccagcggttcatgctggttccagatcagcaaattcaacagcagccccaccggcacatgcaggttgttcatcaccgccagggtgccgccctgcaccaggcaggcgcccttattccaccagtacatgcccagcgctgtactgaccaggccgaggaacaccagcacgccccattgcagcggcgcctccggcagaaagttggctttgccgaacagcaggaatgccggcaacaccaccagcaacgcgccgaggtagaagtaaccgaagcgccggtagtgcggcagattgctcgggtaacgcgccaccaggtgtttgtacataacttgcccggcggcataggtgaagttggccagttgcagtagcaggaagccaccaaggaagtgcggggtgatctggtcgaagcgaatcactgcggcgcccgctaccgccaccagtgcggcgaccagcgcccaggggttgaagcgacggttgagggcgtcctcgataagggtcacgtgcagcggcgtgagaatggtgaacagcaacacttccggcacagtgagtacacgaaagctcagatacaggcacacgtaagtcacgccgaactgcagcgcgccgatcaccagcatgccgcgcatgaaggccggttccaccgagcgccagcgggtcagcgggatgaacaccagcccggccagtagcacgcgcaccagcacggcgaagtagctgtcgacgtgaccggcgaggtattcgccgatcaagctgaaggaaaatgcctgaatcagggtgacaaccagtaaatagcccatgcgcgcctcgtttcgaatgggcgggacattaaaggttttcggcggttgaagaaactcggggcaaaaaaaacccgacctcgctaaagcgtcagtcgggcggtagcactcaggagcaatagtgcaaagggaggttcgttacgcgtacttgaagggttggcgtgaagcgatataaacaccgcgcgattatgtgacgattaaaggatcaagccacctgagccagcagcgctttggcgtggttgatgcccttttcctggaagtccccgctcaggttcaccccttcggcatgaatgaaggtgacgtcatgaatcccgatgaaggccatgacctgacgcaagtacggttcctgatgatctgagctggcgccggtgtggatgccgccgcgagcagtcagcacgatggcgcgcttgccggtcagcagaccctgggggccggtggcggtgtacttgaaggtcacaccggcacgcaacacgtggtccagccaggctttgagggtgctggggatggcgaagttgtacattggcgcagccatcaccaggacgtcggcggcgagcagttcgtcggtcaatgcgttggagcgatccagggaggcctgttcgttgccattgcgctgatccgccggcttcatccagccgccgagcaggttggcatccaggtgcgggaccggattgagggccacgtcacgtacggtgatctgatctgccgggtgggcggcctgccattggctgatgaactgttgggtcagttggcgggaaattgaatcctgctggcgggcgctgctttcgatgatcagaacgttggacatggcgttgtaggctccatctgtaattgctgtaagtcgatggagtgaagattaaacagagccaattcgattaaaaagcgcaaaaaactgctataacccatctataaatttgtttataggcggagcatgctccgctctcgggttatttcggcgtgcaggccagggcgatacgcatcttgataatcgcgcggttgaacttgaccgtggtgttagtgcttttgcccgccggcaccgtgaccgtacggcgacgcggcgattccgggccgttggtgaaggtcaccgagcacacagcatcgtgggtgccgtagttattgagttggatcgagctgatatcgccgtccacgtcggaggcggtgtaatcgatgctcacaccgtcgatcttcttggtcacgtcgatggggtaggcaaacgcgctcatcggcagcagcgccagcaacacacaacagaattttctcattcggcagtctccaataaggacagccagcttaggacaagaggagcccatcttgaaagcgccccgcgttaccctcgatcaatggcgcacgctgcaggctgtggtcgaccatggcggcttcgcccaggcggccgaagcactgcaccggtcgcagtcctcggtgagctacaccgtcgcccgcatgcaagaccagcttggcgtaccgctgctgcgcattgacgggcgcaaggcggtactcaccgacgccggtgaagtgctgttgcgccgctcccggcaactggtgaaaaacgccagccagctggaagaccttgcccaccatatggaacagggctgggaagccgaggtgcgcctggtggtggatgcggcttaccccaatgcgcgtctggttcgcgccctcaccgcattcatgccgcaaagccgtggctgccgcgtgcgcctgcgtgaagaggtgttgtcgggcgtagaagagttgctgatggaaggcgtggccgacctggcgatctgcgggttcagcatacccggctacctcggtacggaaatgagcgatgtggagtttgtcgccgtggcgcacccggagcatgcactgcaccgcatgaaccgcgagctgagtttccaggacctggaaagccagatgcaggtggtgatccgcgactccggccgccagcaacctcgcgacgtgggctggctcggcgccgaacagcgctggaccgtcggcagcctggccaccgccgccgcctttgtcggcagcggcctgggctttgcctggttgccccggcacatgatcgagcgcgaacttgccgagggcgtgctcaagcaactgcccctggaacagggcggcagccgccaccccacgttctacctgtattcaaacaaggacaaacccctggggcctgccacgcagatcctcgtggaactgctgcgcacctttgataccgcaccgctggacgcgcctttcgccgccccccggcaagcctgaaacggagttcgcccatggcctggttcgaccatgaaggatgcagcctgcactacgaggaatatggtcacggcgcgccgctggtgctgatccacggcctgggctccagcagtcaggattgggaactgcagattccagtactggcccggcattaccgcctggtcgtggtggacgtgcgcggtcacggccgctcggacaagccgcgcgaacgctacagcatccagggtttcacctatgacctgatcgccttgttcgagcacctgggcctgccaccggcccacgtggtgggcttgtccatgggcggcatgatcgctttccaactggccgtggacgaacccgcactgatcagaagcctgtgcatcgtcaatagcgcccccgaggtcaaggtgcgcagcgctgacgattactggcaatgggccaagcgctggagcctggcacgcttgctgagcctgtccacgatcggcaaggcgttgggcgagcggctcttccccaaaccgcaccaggccgagctgcgccgcaagatggccgaacgctgggcaaagaacgacaaacgtgcttatctcgccagcttcgatgcgattgtgggctggggcgtgcaggaacgactttcgcggatcacctgtccaaccctggtcatcagcgccgaccacgactacacccctgtggcgcagaaacaaaactatgtaaaactgctgcccgatgcgcgactggtggtgatacaagattcccgccatgccacgcccttggaccaacccgaagtctttaacgcaaccttgctcgattttctaaagacagtcgaaaccactacccaggatcactgacccatgctgaaaaaaatcgccttctttgccggttctgttctgttcgccgccaacctgatggccgccgagcccgccaaggcgccccacgttctgatcaccaccaccaacggcgacatcgagatcgaactggacccggtcaaggcgccaatcagcaccaagaacttcctggcctacgtcgacaagggcttctacaccaacacgattttccaccgtgtaattccgggcttcatggtccagggcggcgggttcaccgcgcagatggcgcagaagccgaccgacgcgccaatcaagaacgaagccagcaacggcctgcataacgtgcgtggcaccttgtcgatggcgcgtaccaatgacccgaattcggccaccagccaattcttcatcaacgtcgccgacaatgcgttcctcgacccgggccgcgatgccggttacgccgtgttcgccaaggtggtcaagggcatggacgtggtcgacatcatcgtcaactcccagaccaccaccaagcagggcatgcagaacgtgccaatcgatcctgtcctgatcaagtcggccaagcgcatcgactgatgcctggcaggcagctccgcgcgcagcccacaaggccgcgcgcgcatttgtaaaaggagagcccgcacggcgggcgtcaaactgaatgctctatcgtcgctttgaacaactgatcgacatcttccgcgacgccccgagcgccgccccgcctgataaagtcctgcctttctacctctactacctgcgccaggtttggccgcattttgctgccttgctggtggtgggcctgatcggtgcgctgatcgaagtggcgctgttcagctacctgagtcgcatcatcgatctggcccagggcacgccgccggccaacttctttcagattcacagcaccgagctgatctggatggccgtggtcgccctgctgctgcgcccgatcttcggcgccctgcatgacctgctggtacaccagaccatcagccctggcatgaccagcctgatccgctggcagaaccacagctacgtgctcaagcagagcctgaatttcttccagaatgacttcgccgggcgcattgcccagcgcatcatgcaaaccggcaattccctgcgcgattccgccgtggcagcggtggatgcgatctggcacgtggcgatctacgccatcagttccctggtgctgtttgccgaggccgactggcgcctgatgatcccgctggtgacctggatcctctgctacagcctggcgctgcgctactttgtgccaagggtgaaggagcgctcggtgatttcctccgaggcgcgctccaaattgatgggccgcatcgtcgacggctacaccaacatcaccaccttgaagctgttcgcccatacccgctatgagcaggagtacgccaaggaagcaatcgtcgagcagaccgaaaaaacccagttggccagccgcgtggtcaccagcatggacatcgtgatcaccactatgaacggcctgctgatcgtgaccaccaccggcctggcactgtggctgtggacgcaatcgatgatttccgttggcgcgattgccctggccaccggcctggtgatccgtatcgtcaacatgtccggctggatcatgtgggtggtcaacggcattttcgaaaacatcggccaggtgcaggatggcctgaagaccatcgcccagccgctggccgtgatcgaccgcgacaatgccccgcgcctgagcgtgccccagggccaagtgcgtttcgagcaggtggatttccactacggcaagaagagcgggatcattggcggcctcaaccttgagatcaaggccggtgaaaagatcggcctgatcggcccgtccggtgcgggcaagtcgaccctggtcaacctgctgctgcgcctgtacgacctgcaaggtgggcgcatcctgatcgacggccagaacatcgccgacgtcgcccaggaaagcttgcgcgaacagatcggcatgatcacccaggacacgtcgctgctgcatcgctcgatccgcgacaacctgctctacggtaaacccgatgccaccgacgaagagctctgggccgctgtgcacaaggcgcgcgccgatgagttcatcccattgctgtcggactccgaaggccgcaccgggctggatgcgcatgtgggtgagcgcggagtgaaactctccggcgggcagcgtcaacgtatcgccatcgcccgcgttctgctcaaggatgcgccgatcctgatcatggacgaagccacgtcagcgctggactcggaagtggaagccgcgatccaggaaagcctggaaaccctgatgcaaggcaagaccgtgatcgcgatcgcccaccgtttgtcgaccattgcgcggatggaccgcctggtggtactggagaaaggccagatcgccgagagcggcagccatgccgaactgctggcccatggtgggttgtatgcgcggttgtggcagcaccagaccggcggcttcgtcggtatcgactgacccttacaacccctttccgatccaacctgtgggagggggcttgcccccgatagcggcagatcagtcaccggatacagcgactgatactccgccatcgggggcaagccccctcccacattagagccctggatttgtgccatagccgtgctgtactcagtgcagtgcccagacgggcgctgaagtaaatctgcagggagcatcactgatttacggatccggtagagcgatctatcaaggacgggttgcatgtctttgttcaagcgttcagtcacagaggggttaggtacgttttggctggtgttaggcgggtgcgggagtgcggtattggccgccgcgttccccgcagtcgggatcgggttgttgggcgtgtccctggccttcgggctcacggtgctgaccatggcgttcgccatcgggcatatcagcggttgtcacctcaacccggcagtatcggtggggctggtggtgggcggacggtttccggccagggagttaccggcgtacatcgtcgcgcaggtggtcggtggcacggtcgccgctgcgttgctgtacttcattgccagcggcaagccggggttcgaactggcgtcaggcctggcgtccaacggctatggcgagcactcgcctggcggttattcgatggcggcggggtttgtctgtgagtgggtgatgacggcgatgttcgtgctgatcatcctcggcgccaccgaccgccgtgccccgccaggccttgcaccgatagccatcggtttggcgttgacgctcatccacctgatctctattcccgtgaccaacacctcggtcaacccggcccgtagcacaggcccggcactgatcgtcggcgggtgggcgatccagcaattgtggatgttctggcttgcgccgatcctgggtgcggtgatcggtgggttcacttatcgatggctgggcaaggaggcgccgggttgaggcaaacgggttcagccctgccgataaggcagggctgcccttgcctcctgtgcatacgccacgatccccacccgttcacgctcgagaaaatcctccacggcattcttcaatcccggatggcgcaggtagtgccacgaccgcgtgatcaccggctcgaaccctcggatcaacttgtgctcgccctgtgctcccgcatcgaagcgttgcaggccttgggcgatggcgtagtccataccctggtagaagcaggtttcgaagtgcaaacggtcaaactctgccaggcagccccagtagcggccgtagaagctgtcgccgccgagcaggctgaaggccatcgccaccgggcgcgagccttgcttggccagtaccacgcggatcgcttcaggcatgcgctcggccagcaggctgaaaaaagcgcgagtcaggtagggcgattggcggcgcacggcgtaggtgttggcatagcaggcgtagacaaaatcccactgcgcctcgctcagttcatggccttgcaaccactcgaaatcgatcccctgccccgccacttgctcgcgctccttgcgcatctgtttgcgcttgcgcgaactcaaggcgtcgaggaagtcctggaagtcccggtagcctcggttctgccagtgatactgacagcccaggcgctgtaaccaacccggttgccgggccagtgcagcatcggccaggtcatcggtgaagttgatatgggcgctggaaagcccttcgatctccaggtaacccggcaggctcttgagcagctcaaaaccgtcttcggcactggcggccaatagacgcggaccgctgaccgggctgaaaggcaccgccgtcagcaacttggggtaataatcgatgccggcgcgctcacaggcatcggcccagccgtgatcgaacacgtactcgccataggaatgccatttgcgatagctgggcaacgccgccaccagccgctcaccctcccagtgcagcaaatgctccggctgccagcccgattgcgggcccaggctggcgctgtcttccaaggcgctcaggaacgcgtgccgcacgaacggctgcccctgcggcaccagcgcatcccaggcttgcggggcaatttcggacaggctgtccaggcgttgcagcggcatcggcatcctcactggttcggggcgtgaaagcctggcgagtatcgccgattgccgaccctggcacacccccgtttcgcacgacaaggctctaaaccaatagttccgaacgtgaaaaatttgtcatctagatgacatcacttcgccactgcgccgtcataaacgatcgtgatactgacgcctgtttttagagcgcctggttctacccggcggctatttttccgtccgtcatcggtcggttgtgtcctggatggtttgccatccctcctcactttcggagattgatatgcgtcttgcttccactaaaactgcggcggtcctgtgcggcggcctgttactggccctgagcgttccggccagcgctgcagtcgacgctaaattgctcgacatgctcaaggccaacggccagatcaccgcggcgcagtacaccgaactgcaaagcgagctggccaaagaccagaaagaacagcagatcgcacggcaagctcaacaagagaccaacgaacagatcgcggccaccgcgaagaaaaccaatgagctgagcagcttcgaccagaagctggcctgggccgccaagactcagttcaagggtgacgtacgtttccgtcaggaaaccgtgaaaatccagggcgaatccaacaacggcggccgcgacaaggaccgtcagcgcatccgtgcccgcctgggcgcctacaccgagatcaactcgcaagtcgacaccggtatccgcattgccaccggcagcagcgacgatgcgcgctcgaccaaccaggaccaggacaactatttcgacaagaagtcgatctggctggaccttggctacatcgactaccacccggaccagatcaagaacctgcacgtgatcggcggcaagatgctgcaaccgtgggtgaacatgggcgacgtcatctgggatagcgacatcaaccctgaaggcctggccctgacctacaaatacccgctgggcagcagcgccgagctgttcggcagcctcggtaactacaacctcaaggacaacgtcgacggcgatggcgtgcaattccgccacgacctgcgcctgacctctggccagttgggcacacgcttctcggtcaccgacaacctgaaaatgaccctgggcggcagcatctacgcctaccagaacgacaaggacagccgttgcacaaccaccaccacgccttgcgcactggcggtcaacggtaactcggccgacaaccagttccgcctgtatgaaggctttgcccaagccgacatcggtggcctggctgtaccgctggcgttctacggccagtacgtgaaaaacaacgacgccgtgaccgaccaggacaccgcctggctgatcggcgccaagtcgaaagtgttcggtttcaacctggactacaactaccgcgacatccagcgtaatgccgtggttggcgccttcaccgactcggacttcgccaacggcaccaccggttcgcgcggtcacaagatgaaggtcagctacgacatcgacaagaacttcgccctcggtgccacgtacttcctgaccaaggccgactacgccagccgtacccagcgtgacgccaataccaacaccctgcagctggatgcagaagccaagttctaacagtaagtgttgaaagccttgggccaggacgacccgaggtggctgtaccagtcttgcgtgagtggatcggtccccatcatccgttcgctccacccacgcgagcctgtttattccccgcctttgtgatccttgagccgctcgtcagccagacgctgcgccaaggcctccacaccctctaccggctcatccggcattatcttcagcgtcgcctgcatcaggcgcatctggcggataaaccggcggcagttcgggcagaacatcaagtgatgacgcaccagcagacgctcgcgaaaggtcaactgcccatcgagatagtcactggaacgtgccacttgttctttacaggtcaacattcgcccgtttcctcaaaatgctccaccgtggcgaagactttaagccgtgcccgatgcaacagcacacggacattggagagcgacaacgtcagaagattacagatctcttccaactccaggccctgccgttcgcgcagcaccagcacgctgctttgcaactccgacagactcagcaacgtatgctccaggcatttgcgcagttcatcttcggtgagcagggcttccggggtgtcctggtgccaggcgtagggggcgacggcccaatggccatcgtcaggcgtgaagcgatcatcaccgatggtgccgtggggcgaaggcagatcgtcgagcagcacttcgcgacgattctgcttgtagcgccccttggcagcgttggcggtaatggtcagcagccaggtcttgaggctggaacggccctcgaacctggccaggttgcgcaccaccgacagccaggcgtcctgcaccacttcgtcggcgtggcgctggccgacgatggcataggccaccgcccgcatggcgctctggtaggtggtgaccaattccttgtaggcccgctgctcacccttgagcaggcgttcaagcaggtgcgcgtcgtccgctgctgccattcaagacctcgattgtcttagcgtttgcgcaggatcacgctgccgatcgaatagcccgcgccgaacgaactgagcaccgccacggagcccttgggcaggtcatcctgattcttgtggaacgcaatcaccgaacccgccgagctggtgttggcgtaggtatcgaggatcaccggcgcttcttccaccgtggcttcgcggcccagcagtttcttcacgatcaggtggttcatgctcaggttggcctggtgcagccagaagcgcttcacatcggtcacgttcaactgattctcttccaggtgcacgccgatcagctcggccaccatcgggcatacgtcgcgaaacaccttgcggccttcctgtacgaacagtttgtccggcgcgccgatgccttcttccgcggtgcggttgaggaagccgaagttgttgcggatgttattggagaacttggtcagcagcttggtgctcaccacgtcgaactgatgttcggaggttgccaggtcggcgcgctccaggaccacggcggtggccgcatccccaaagatgaagtggctgtcgcggtcgcggaagttcaggtggccggtgcagacttccgggttgaccatcaggatcgcccgcgcctggcctagctggatgctgttggcggcgttctggatgccgaaggtggccgaggaacaggccacgttcatgtcaaaaccaaacccttcgatgcccaaggcttcctggacttcgatggcgatggccgggtaggcacgctgcaggttggaacaggcgacgatcacgccgtcgatgtcggcagcggttttgcccgcgcgctgtagagcttgttcagcggcgccgacggccatctggcagaggaccgaccattcgtcgttgctgcgctcgggcaggcgtggggccatgcgctgcggatcgagaatgccgtccttgtccatcacgaagcggctcttgatgccggaggccttttcgatgaaggcggcgctggattcggtcagcggctgcacgtcaccgcgctcgatggcggcggcgttgtcgctgttgaactgttgcacgtaagcattgaaagactgcaccagctcttcgttggaaatgctgttggccggggtatacaggccagtgccgctgatgacgacgttatgcacggtcgttcctctaaatctgtcaggcagaagatattggtaccgtcgtaccaaactgtaagtagtccgattccgctccgcggacaccaaactggcatcgctttattccatcgcgccgcagcctttcacgacgatcccggcatttataaccgcgaagtttgccacaaccctcggaatttggcgctatctgtgggagggggcttgcccccgatagcggtgggccagtcaacacatcctttactgacagaccgcaattgggggcaagccccctcccacactggacctgtattgccctggaaaccgtgtagatatcaggcttctaccaggctccactgcttgctcaaacgcttgtcggaaatcggcaccttggtgcccaactgctgggcaaacaacgacacccggtattcctccagccaccagcgatacagctccaactgggggtcgcgcttgccttcctgggcgtgttttttcagacggttttcgtactgcgtccacaggccggccagctcgccgctccacacccgatccttttgcacttggctcggcagtttttccaggcgcaactcgatggccttgaggtaacgcggcaactccttaaaccactgcgccggggtttcccgcacaaaaccggggtacaccaggttgctcagttgctgcttgatgtcgttcaaggccacggcctgggccaggtcgatcttgcctttgaagcgtttttgcaggccatgccagagtttcagcacctccagggtcaggcgcgccaggcgctcggcgtgttcggtccaactgctgcgtttgcgctcggccagggcagccaaaccggcgccatcacgcggcaggttggcttcgccttcgagcacgcaggtgtcgaggcttgcgagcaggatgtcttccaccagcgcatcgatgcggcccaactcgcggtacatcaggcccagttcggtcaggcctggcagtttgccgcgcaggaatttcgccggttccgccagttgctgcatcagcaggcgttgcaaggcgcggcgatgctggaactcagcctcggcagccgtggagaaacgcccctccttgaccgtgccgttgtcttccaccagtgccggatataccgtcatcgacagcccggcgatcttttgttgcgtcttctcggccaccgccgcgaataccttggcctccaccggctgctggctttttgcggtttgcggcacagccaatgcggcctggctggcctcggcaaaacgcgccgtcagttcggcgagatcccggccttcaccaaggaacttgccctggccgtcgaccacttccaggttcatcttcaggtggctttccacctgctgcgcggcctcagcccaggcttcatcgctgacccgcgccccggtcatgcgcaacaattcgcggcccagggcctggggcaatgacccctggccgaactcgatgcgttgcagggcagccttgacgaagtccggcaccggtacaaaattcttgcgcagcgccttgggcaggttgcgcaccagggcgatgcacttggcttcgatcacccccggcaccaaccactccaggcgctccgccggcaaggcgggcaacagcggcgccggcacacgcagggtcacaccgtcacgcgggtggttgggttcgaagtggtaactcaaggccagttccaggtcacccaggtggagggtgtccgggtaatgcgcagcggtgacttcgctggcctcgcgggccagcacgtcttcttcgcgcatgatcaacagttgcgggtctttctggctgttgaccttgtaccagctgtcgaaggtcgcggtctggtggatctccgccggcaggcgcgcatcgtagaaggcgaacagggtttcctcgtccgccaggatgtcgcgccggcgcgccttggcttccaactcgtcgagctgttccagcagttgctggttggcggtgaggcacttggcccgcgactggatctcgccgcgtaccaggccttcacggataaacagctcgcgggacaccaccggatcgaccggcccgtagtgcaccggccggcgcccgaccacaatcagcccgaacagggtgatctgctcaaaggccacgacctggccgcgcttcttctcccaatggggctcgaagtggtttttcttgatcaggtgcccggccagcggttcgatccagtcggcgtcgatcttggcgaccatgcgcgcatacagcttggtggtttccaccagttcagcggtcatcagccattgcgggcgtttcttgccgatgcccgacgaggggtgaatccagaaacgccgctgacgtgcgcccaggtaatcgccgtcctcggttttctgaccgatctggctgagcaaaccggacagcaccgccttgtgcagtttcgggaagtccgccggctctttattgacgctcaactgcatgtcgcggcagatcaggctcaactggcgatgggaatcacgccattcgcgcaggcgcaggtagttgaggaagttcttgcggcaccagttacgcagtgggctggcagtcagttcctgacgttgctcttcaaaaccgcgccacaaattgaccaggccggcgaagtccgaatccgggtccttccactgtgcgtgggcctggtcggcggcctgctgacgctccggtgggcgctcgcgcgggtcctggatcgacatggcgctggcgacgatcagcacttcctgcaagctgcccagcttggcggcttcgagcaacatgcggcccatgcgcgggtccaccggcaggcgcgccagctggcggcccagcggggtgagctggctgttgcggtcgaccgccgacagctcttgcagcaggttgaaaccatcgctgatggctttgccgtccggcggttcgataaacgggaaatcggtgatttcgccgagacgcaaatgcagcatctgcaggatcacagcggcgaggttggtgcgcagaatttccgggtcggtaaattccgggcgtccgataaaatcttcttcgctgtacaaacgaatgcagatgcccggctcgacccgaccgcaacggcctttacgctggttggcgctggcctgggaaatcgcctcgatcggcaggcgctgcaccttggcgcggtagctgtagcggctgatgcgcgcagtgccgctgtcgatcacataacgaatgcccggcacggtcagcgaggtttccgcgacgttggtcgccagcaccacgcgccggcccggatgggactggaagatgcgctgctgttcggccggcgacaggcgcgcgtacaacggcaggatctcggtgtgcttgagctgggccttgcgcaacatgtcggcagcgtcacgaatctcgcgctcccccggcaggaacaccagcacgtcgccggggctgcgccgctcgctgcgctcataggcggcgatttcatcgagggcggcgaggatcgcctggtcgacggtgaggtcgtcctcgacgcggttgccttcctcgtcctgctccagggtcagcgggcggtaccaggtgtctaccgggaaggtacggcccgagacctcgactatcggcgcatcgtcgaaatgcttggagaagcgctccaagtcgatggtcgccgaggtgatgatgaccttgaggtccgggcgacgtggcagcagggttttcaggtagcccagcaggaagtcgatgttcaggctgcgttcgtgggcctcgtcgacgatgatggtgtcgtagcgctccaggtagcgatcgttctgggtttccgccagcaggatgccgtcggtcatcagcttgatcagggtgttggaatcgctctggtcttcaaagcgcacctgatagccgaccagcgcgcccaatggcgtggccaactcttcggcgacccggctggccacgctgcgtgcggcgatccggcggggctgggtatgaccaatcagaccgaactggccgcgaccgatttccaggcagatcttcggcaactgggtggtcttgcccgagccggtttcgccggcaatgatcagcacctgatgcttgttcagcgcctctttgatttcatcgcgcttggccgcgatcggcaggctgtcgtcataacgaatcaccggcaggctggcgcgccgcgccgtgacctgggcgcaggacgcctgcatgcgcgcgacccactgcgccagcttctcctcgtcgggcttcttgcgcagctcaagcagctggcgccgcaagcggtggcggtcggcgagcatggcgtgatcgagggttttgagcagttggtcgatagtgggcgcttggtcagtcatcaggtacgcaagggtcgtctatttatgcagggggcggattgtcgcagaaaaccgcccccaagcgtgccccctcattcgttatcgcggtccttacgccggtacgggaatacatcgatcaccttgcccgcccggatcgcctcctgcagccccttccaataatcggcgttgtacaactcgccgtgcagctcgtcgaagagcttgcgctggccggcatcggcgaacaggaacggtgggaattcttcggggaagacgtccaacgggccgatggaataccagggctcggaggccatttcatcctccggggtacgcggcgccgggatgtgccggaagttggcctcggtgagaaaacagatttcatcgtagtcgtagaacaccacgcggccatggcgggtgacgccgaagttcttcagcagcatatcgccgggaaaaatgttcgccgccgccagttgcttgatcgccaagccatagtcttccagggcctcgcgcacctgggcggggttggcgttgtcgaggtagaggttgagcggggtcatgcgccgttcggtccagcagtggcggatcagtacggtatcgccttcgacttcgacggtgcccgcagccacttccaatagctcggccaggcactcaggttcgaatttgctcagggggaaacggaagtcggcgaactcttgggtatcggccatgcgcccgacccggtcgacgcttttgaccaggcggtacttctcgatcaccgtggcgcggttgatgtttttcgacggtgaaaaacggtccttgatgatcttgaacacggtgttgaagcccggcagcgtgaacacgctcatgaccatgccgcgcacgccgggggccatgatgaattgatcgtcggtggtcgccaggtggttgatcagggcgcgatagaactccgacttgccgtgcttgtagaaaccgatggaggtgtacaactcggcgatgtgcttgccgggcaggatgcgtttgagaaagccgatgaattccgccggcaccggtacatcgaccatgaagtaggagcgggtgaacgagaagatgatcgatacatcggcttcgtcggtgatcagcgcatcgatctggataccttgcccttcgcggtgcagcaacgggatcaccagcggccattgttcgtcgcgggtgtagatgcgcccgacgaggtaggcacctttattacggtagagcaccgaggaaaacagctcgaccttgaggtccgggtccttgcacacccagtccggcaggttttcccgcagttgggtttcgaggcgttgaaggtcgcctgcgaggtcggcgtagggttcgctgaagcggtagtcggcaaagatctgcgcgagcatttccgggattttcgcggcgggggtgtaggtgcgcgtctgcgcggcccgtgcccgacgcaggctaggccgggtggtgtggatgaacatacagccgtcgctgatcaggtcgtggctgaacagcccgcagaagatcgagttgtaccaggtctcggagagttcatcgtcaaagcgccggtcgatcaggccgatgtaggcacttttgaccaagggccacgcatcgatgtcgagcagggcggcgtcatcgaagcgctcacgcaaccgctgggtcacctcagtgaccttttcctcatagagattgatccgcgccgccgacgccgcctggccctgctgccactgggccttttcgaaacgctcgcgggcgccatcggtgatctggcggaagtgttcgcggtaatcgtcgaagccatcaaggatcatctgggcaatggcgagggcggattgcgacatgcgggaaacctcgagcgggcatcgggaagccctgagcttagccagtgtacgaacacaggagaagggtcatttttcgtgcagccttgtacaactccgttcatttcgtacatttattttcaatttatttaattcgaccaattggtcaataaacgcactgaaaagtcgcacattgttttccccatacgcccacaacgacgcggctttgctgcttagcgccggaaacacgtgtactcccccggggactctgctccgcatacatctttggatccaactaagggaaaccctgattaccaccttgatggcactttgatatatagcgcgccctctcccaccctaacaaggtccgaagaccgatccgggaacaggttctaatcgcccaaggagcatagagatgtcattgaggaacatgaggatcggtctgcgtgccagtctgagttttggggttttggccagcttgctggtgattgtgggcctgttcggcctgggccagatggccaagctgcgacagagcgcgctggtcatcgaacaatcgtggatgccgagcatcgagaacatccacgacagcgcggcctttgtcgccagcatccgcctggaggccttgcgcctggcgaccaccgacgaatcgcggatccgcgacaacagcaaagccctgatcactcgccagcgcagcgagctgcaaaccctgctcgaccatcacaaaagcctgctcagcagcgacgaagaacgccagatgctcaagcaactcgaagggaacgtgaacacttacctggccctcgtcgaacagatcgtcaccctggtggacaaggatcagcagcaagacgccattgacctgctcaacagccggctcgctccgcagggtgtgatcctcaacaagagcctggaggacatgatcgtgttcaaccagaacggcgtggaaacggcggtggattcagccgcacagacctattccagtgcacagtggatcgtcggcctgatcatcgtattcgccttgatcgccaccttgttgctcgcctggctgctgacccgcagcatcaccgccccgctcggccaggcgctgagcgtggcccgcaccattgccggcggcgacctgagccagccgattgccgtcagcggcaaggacgaaccggcccaattgctcaacgccctggcgaccatgcaggcgcagttgcagggcaccattcgcggcatcagcgaatcggcgcaacagctggcctccgccgccgaagagatgagctcagtgatggagcaaagcacccgtggcctgcaggcgcagaacgacgaaatcgaacaggccgccaccgcagtcaccgaaatgagcgcggccgtggacgaagtggcgggcaatgcggtgtccagcgccgaggcgtcccaggcctccgacgaggacagcaagcacggccactaccagatcagcgaaaccatcagctcgatccagaacctggtcgacgaagtgcttggcgcctcgaacaaggccgaaggcctggcagtgcaggcccaggacatcagcaaggtgctggaagtgatccgcggcatcgccgggcagaccaacctgctggcgctcaacgccgccatcgaagcggcccgcgcaggcgaggccgggcgggggtttgcggtggtggccgatgaagtgcgctccctggcgcaacgcacccaggactccaccgaagaaatcgagcagatgatcaccggcatccagcgcggcacccaggatacggtcgacgcgctgaacagcagcgccgagcacgcgggccagaccctgcagcgggccaacagcgccggcagtgccctggaaaaaatcaccgcggccatctcgcagatcagccagcgcaacctggtgatcgccagcgccgccgagcagcaggcgctggtggcacgcgacgtggaccgcagcctggtgaacatccgcgacctgtccacccagaccgccgccggtgccacccagacctcggccgccagccaggaactgtcgcgcctggcggtggacctgaatgcgctggtgacgcggtttgtcctgtaatcattagacatgtcatgcaacactcgcggccttattgaggtaggagtgttccgtgagacctgtcgacaccttgtacttgctgggactcgccgccatctggggcgcgagcttcctgttcatgcgcattatcgcgccggagatcggcacgctgccgaccgcatttttccgcgtgtcgatcgccgccgccgggttgctggtgatcctggcggtgatgcgggtgagctgggacttccaaggcaagttcaagactgtattgctgctcggcgtgatcaactccgggatcccggcgaccatgtattcagtcgccgcccaggtgctgccggcgggttactcggcgatcttcaacgccaccacgccgttgatgggtgtgctgatcggcgggctgtttttcagcgaacgtctgaccccgtcgaaagtcgccggggtgtgcctgggcctgctgggcgtgggggtactgacccgcgccgggccggtggcgtttgacctgcaattgctgatgggcgcgctggcgtgtttgctggcgaccacctgttacggctttgccgggttcctggcaaggcgctggctggatcagcgtggtggcttggacagccgcctgtcggccctgggcagcatgctcggcgcgacgttgttcctgttgccgttctttgcctacagcgccatcagccaaccgccggcgagttggggtggatggcaggtgtgggggtcgttgctggggttggggctggtgtgtacggcgtttgcctacattctttacttccggttgctgacgtccatcgggccggttaagtcgatgacggtgacgttcatgattccgccgtttggggtgttgtggggggcgttgttgctgggggagccgttgtcgatggcgcacctgtatggcggggtgttgattgcgggggcgttgtggttggtgttgcggccgcgaaaattgtaggagcccggcttgccggctcctacagtgcggtgtcaacgcttacggaagacaaacaccaaaccgatgatgatcaaccccatccccaacaggctcaacatcgcgagcttgttgccgaagatcagatagtccatcaccgccgtcaccgccggcaccagatagaacagactggtgacattcaccaggttgccccgggcgatcaggcggtacagcaacagcgtggccagcaacgacaccaccaagcccatccacagtaccggcaggtagaagctgccgctgtgttcaaaatgaaacggctggaacggcacaaacaccgaacacagcagcaaccccgccaggtattggaccggcaacgtgcccaaggggttgtcggtgatgcgtttctgcatgatcgagccgaaggtcatgctggccagggccaacaacccaaacagcatccccgccaaagacatgccggacaaaccgatgccctggtagaccaccatgatcagccccgccaaccccagcgccaggccaaacaaccgactcaacgaacgctgacgttccatcaacaccacggtaaggatcggctgcacgcccatgatggtcgccatcatgccgggggtgactttcaggtccagggccagcagatagaaaatctggtatgcccccagcagtaccaacccggttgccgccgcgtacagcatgggcttgccggggcgcggcagtttcaacttgaggatcggtatcagcaccaccaggcccacgagggcgatggcaaaacggattaacagaaacgcaaagggtgacgcgtgggccagcccccatttggagaagatcgccccgctgctccacagcaatacaaacaggctcgtcgaggccgccgcggccacggattgtttcgaaagaacagacatggttaccacctgtcatcaggcaaaaaaagccgattcagcagacgctgaaatgcattaggtttttttcaggcgggcagacgggaacagcaatcagctgatcagcccaaaatgccaacacccggcggtgatacgactgcgtacaccggcgtgctactgacaggtggggggtagtgactgatctgcgcaggctgcttgttcgcgcacggcacgaccacagcgttgaccgctgaatcgactaccgctgtgcgctggagagctggcatgggctgatcttgtgtgaagggatgaagaagctcggactataaccacccggtgatacgttttgcaatcggcatgaatggaggagttttcatgtggggcctgcaggaccggtcgctataatgccgcccagcattttccaaggagttcccatgttcgcattgccctggctgtacctggcgcttctttccatcggctatctgctggcgttgatatacgggcaactgggggtgttggcagccgtgtccgtcgccctgctgctgatcgctggctacgcggtacgccagcaacgcacgcactgggcgcgttacctgggccacgggctgttcatcgtgttggcgctgagcctggcgatgcactggttgccgggcttctacaacgggaggggcattgcctcgcaccgcttcaccgaggatgccgtgcccttctcgatgtatttgaaccaggacaaacctctgatcggcttctggctgttgctggcctgcccatggattgtggcacggcgctcgttgcgcttgtcgatctgcgtggccgccctggcattgaccctcaccgccatctccgccctcggcggagcggccttgctgggcgtgatcagttgggcaccgaagtggccggaacaagcctggctgtgggtactcaataacctgttgctggtgacgctggtggaagaagccttgttccgcggttatgtgcagggcggcttgagccgacgtttcaaacacctgccttacggcgagaacctggcgctgctgctggcctcgctgctgttcggcctggtgcacatcggcgcaggctggcattgggtattgctggcgagcatcgccggggtgggttacggcctggcctatcgttttggcggcctgggcgcggcggtggccacgcactttggcttgaatctgcttcacttcgggttgtttacctacccgatgctggccggttgatcccctgcaggggaacgtgcgtaccgccgattgttgcaaaaattaagttaaataaaccgccgttcctgccgataccccctgaaagccttgcggattgaacaatcatgcgtaataaccaacccgttacccagcgcgaacgtaccttccccgctcagcaacggttgatctccaccacagatgccaaaggcgtgatcacctactgcaacgacgccttcgtcgaaatcagtgggttctctcgcgacgaactggtgcgtgccccgcacaacctggtgcgtcacccggacgttccggcggcggtgttcgcgcacatgtggtcaacgctcaaacaaggcttgccatggatgggcattgtcaagaatcgctgcaagaccggtgaccattactgggttaacgcctatgtgacgccggttttcgaaggcaaccaggtggtcggctacgaatcggtgcgcatcaagcccaccgccgagcagatccgccgggccgaagcgctctaccaacgcatcaaccagggcaagtcggcgatcccccagcgggacaagtggctaccggtgttgcaggactggctaccgtttatcctggtgagccagttgagtttcatgatcggcgcgtccctcaactcccactggggctttgccctggcggcggggttgtcggtgccgttgggcctgctcggcctgagctggcaacagcgcggcctcaagcgtttgctgcgcctggccgagcagaccacctccgacccgctgatcgcgcagatgtacaccgacagccgtggcgcccaggcgcgtctggagatgtctatcctcagtcaggaggcacgtctgaagacgtgtcttacccgcctgcaggacactgccgagcacctcaacgaccaggccgcgcagtccaacaccctggcgcataacagctccagcggcctggaacgccagcgcgtcgagactgagcaggtggcgaccgccgttaaccagatggcggccaccacccaggaagtcgccagccatgtgcagcgcacagcggacgcaacccaggaagccaaccgcctcaccggccgtggccgcgacatcgccggggaaacccgcgaggcgattcagcgtctgtccgtagcagtgggtgagaccggtgtgaccgttacccagttggccaaggacagcgatgaaatcggcggcgtggtcgacgtgatcaagggcattgccgaccagaccaacctgctggcgctcaacgccgccattgaagcggcgcgtgccggtgaaatgggccggggttttgcggtggttgccgacgaagtccgccaattggctcagcgcacagccgagtcgaccgggcagatccatgccctgatcgccaagctgcaacaaaccgccgccgctgccgtacagaccatggacgccgggcatcgccaggccgaagaaggcgtggcacgggtgatggaggcggatcaggcgctggtagggatcagtgaggcggtggcgcatatcaccgacatgactacccagatcgcggctgccaccgaagagcaaagctcggtggccgaagagatcagtcgcaacatcagcaccattgcgctgttggcggaccagacctcggagcaagcgtcgaactcggcgcagttgagtgaagaattgacgcatacggcgaatacccagtattcgttggtggagcgcttcaaccgatagaccgttatcggggcggtgcgacgattcgacaacccccctcccacactttgactgtattcacaaatcaaaatgtgggagggggcttgcccccgatagggccctagaggacgccgagaaacctggccaccttcaccgccgccgcctccaaatgctgctcatgactaaaccccgacgccttcaacggcttcaagtcatgatcccccgccaccagccacatcacctcgatgctcggcgacaattcatacccctcaaccgccgcccgattacccagcgcatcgcgctcgccctgcacaatcaaggttggcgtcttcaaccccgccaaatgctcaacccgtggtttctccggcttgcccaccgcgtagaacggataccccaggcacaccagcccatcggcgcccagttgatcggccaacaaactggccatgcgcccgcccatggacttgccaccaatggccagtttcccagcgacatgacgtcgcacctcggcatgcaccccgcgccaggcttccagcagtttcggcgcagggtttggcgggcgcttgccgccatccacccggcgctgggccatgtagggaaactcaaagcgcaacacgttgacgccatgcccggcaaggcctgcagccatatcgttcatgaaggatgagtccatcggtgcgccagcgccgtgggccaggatcagcgtgacgggatcgctcgaaagcgcctccaccgcgacatcccacaaccacccatgttcccgcacacactgcgcccattgatccccgtcaatactggccttgtgctctttgcccatgcttgcctcgctttttagtctgcctataactccagcccaagtgccgcatttgcttgggttgaaccgtggatggggaaccatgaacactactttaagtaccgcctataactacaaggtggtccgccaattcaccattatgacggtggtgtggggcatcgtcggcatggggctcggggtttttctcgcggcccaattggtgtggcctgcactcaacttcgacttgccgtggaccagcttcggccgcctgcgcccgctgcacaccaacgcggtgatcttcgccttcggtggctgcgcgctgttcgccagctccttctactcggtgcagcgtacctgccagacccaattgttcgcgccgaaaatcgccgcgttctgcttctggggctggcagttggtcatcctgctggcagcgatctccttgccgctgggctacaccagctccaaggaatacgccgagctggaatggccgatcgatattctgatcaccattgtctgggtggcctacgccattgtgttctttggcaccgtggccaagcgcaacaccaagcacatctacgtcggtaactggttcttcggtgcgttcatcatcaccgtggccatcctgcatatcgtcaacaacctggaaatcccggtcagcctgaccaagtcctactccctctatggcggtgcgacggatgccatggtgcagtggtggtacgggcacaacgcggtaggctttttcctcaccgccggtttcctcggcatgatgtattacttcgtgcccaagcaggccgagcgtccggtgtattcctatcgcttgtccatcgtgcacttctgggcgctgatcaccctgtacatctgggcaggcccgcaccacttgcactacaccgcactgccggactgggcacagtccctgggcatggtgatgtcgctggtgctgctggcaccgagctggggcggcatgatcaacggcatgatgaccctgtcgggcgcctggcataagttgcgcagcgacccgatcctgcgcttcctggtggtgtccctggcgttctacggcatgtcgaccttcgaaggcccgatgatggcgatcaagaccgtcaacgccctctcccactacaccgactggaccatcggccacgtacacgccggcgcactcggttgggtggcgatgatctccatcggcgcgctgtaccacatgatcccgaaagtctttggccgcgagcagatgtacagcctcggcctgatcaacgcgcacttctggctggccaccatcggcaccgtactctacatcgcttcgatgtgggtcaacggcatcgcccagggcctgatgtggcgtgcggtcaacgaagacggcaccttgacctactccttcgtcgaaaccctggtggccagccaccctggcttcatcgtgcggctggtgggcggtgcgatcttcctcagcggcatgttcctgatggcttacaacacctggcgcaccgtgcgttcggcgcagcctgtcgaagccgccaccactgcgcagttggcctgaggagtctgtgatgaaacacgaaacgattgaaaagaacgtcggcctgctgatgctgctcatggtgctcgccgtgagcatcggcggcctgacccagatcgtcccgctgttcttccaggacgtgaccaacaagccggtggagggcatgaaaccctacaccgcgctgcaactggaaggccgcgacatctacatccgcgaaggctgcgtacagtgccactcgcagatgatccgcccgttccgtgccgaaaccgaacgctacggccactactcggtcgccggtgaaagcgtgtgggaccacccgttcctgtggggctccaagcgcaccggtccggacctggcgcgcgtcggcgcacgctactcggacgactggcaccgcgcgcacctgtacaacccgcgcaacgtggtgcccgagtcgaaaatgccggcctatccatggttggtcaccgccgccgtcgacagcagccacaccgagaccaagttgaaagtgatgcgcaccctcggcgtgccgtacaccgacgacgacatcagtggcgccgtggccagcctcaagggcaagaccgagatggacgcgctggtttcgtacctgcaagtgctcggcactgccatcaagagcaagaggtgagccatgggatttgaattcgatgcaggcaccatccgcggcctcggcacgctggtggtcgccatcgcctttatcggcctgtcgctgtgggtgttcaacaaccggcgcaatgcggaattcgagcaggcgcgcctgctgcccttcgccgatgaaccttctccatccgacgctcaagaagagcctgcaataaggagcacccggccatgaccctattctggagtacatggatctgcgtactgaccctcggcagcctgatcggcttgacctggctgctggtcggcacccgcaagggcgagaccaagggcagcgtcgaccagaccatgggccacgccttcgacggtatcgaggaatacgacaacccgctgccccagtggtggttcatgctgttcgccggcaccctggtgtttgcggtcggctacctgatcctctacccgggcctgggcaactggaaaggcgtgttgccgggctatgaagacggctggacccaggccaaggaatgggacaaggaaatggccaaggccgacgccaagttcgggccgatcttcgccaaattctcggccatgcccgtggaagaagtcgccaaagacccgcaagcgctgaaaatgggcggtcgcctgtttgcctccaactgtgcggtgtgccacggctcggacgccaagggcgcgtttggtttcccgaacctggcggacaacatctggcgctggggcggttcggccgaggcgatcaagaccaccatcctcaacggccgccacgcggcgatgccggcctggggtgacatgctcggcgatgaaggtgtgaaaaacgttgccgcctatgtgcgccacgacctggccaagctgcctctgcccgccgacagcagcgccgatgtggctgccggccaagcggccttcaacaccacctgtgtcgcctgccacggtccggaaggccatggcatggaagccatgggcgcgcctgacctgaccaaaccggccggctacatctacggcaccagccttgcgcagttgcaacagaccatccgccacggccgccaaggccagatgccggcgcaggaagtgctgcaaggcaatgacaaggtgcatctgctggcggcctatgtttacagcctgtcccacaacgctgatggcgcaacgccagaaagccaagcgcaataaccgctgatcgccgccccattttggggcggcaaccctggtgctgtacgcgaccaagtgtcacacccttccaaagcacaactttcccctcctcactttcgggtctacgcttgttcccacagcggaccaatcctggcgtacgcgacgacattcgttgcgacccctgaattttcctgtccactcgatcagctttcgatttccgattttgtccttacaccaaacatggaaagggcgcagaatctggcgtggaacgcattgatacaggtcagtcattgcgttgcaatgacccctcgctttctacatacttgcggccgattttacctataaaaaaacctaaaccgtggaaccttagaatgagcacagcaatcagtccgactgcttataactataaggtagtccgccagttcgccatcatgacggtggtctgggggatccttggcatggggctcggggtgttcatcgcctcgcaactggtctggccggaattgaatttcggtttgccatggacgacctttggccgcctgcgcccgctgcacaccaacctggtgatcttcgccttcggcggatgtgcattgtttgccacctcctactatgtcgtgcagcgaacctgccagacgcgactgatctccgacagccttgcggccttcaccttctggggttggcaagcggtcatcgtcggcgccatcgtcaccctgccgctgggctacaccaccaccaaggaatacgccgagctggaatggcccattgccattttgctcgccatcgtgtgggtgacctatgccgtggtgttcttcggcaccatcgtcaagcgcaagaccaagcatatctacgtgggtaactggttctacggcgcgttcatcctggtgacagcgatgctgcacatcgtcaaccacgcctcgttgccggtgagcctgttcaagtcctactcggcctacgccggggccaccgatgcgatgatccagtggtggtacggccacaacgccgtgggtttcttcctgaccaccggtttcctggggatgatgtactacttcgtgccgaaacaggccgaacgtcctatttactcgtatcgcctgtccatcgtgcacttctgggcgctgatcaccctgtacatctgggcaggtccccaccacttgcactacaccgcattgccggactgggcccagtccctgggcatggcgatgtcgatcatcctgctggccccgagctggggcggcatgatcaacggcatgatgaccctgtcgggcgcctggcataaattgcgcaccgacccgatcctgcgcttcctcgtggtgtcgctggcgttctacggcatgtcgaccttcgaagggccgatgatggcgatcaagaccgtcaactcgctgtcccactacaccgactggaccatcggccacgtacacgccggcgccctcggctgggtggcgatgatctccatcggcgcgctgtaccacatgatccccaaactgttcggtcgcccgcaaatgcacagcgtcggcctgatcaatgcgcacttctggctggccaccatcggcaccgtgctctacatcgcctcgatgtgggtcaacggcatcacccagggcctgatgtggcgtgcgatcaacgatgacggcaccctcacctactccttcgtcgaagcactgcaagccagccatccgggttacatcgtgcgcgccctgggcggtgcattctttgcctccggcatgttcctgatggcctacaacgtctggcgcaccgtgcgtgccgccgaccctgtagaagccgaagccgccgccaagatcgccgttgtgggagctcactgatgaagcatgaagtagtcgagaagaatatcggcctgctggccttcttcatggtcatcgccgtgagcatcggcggcctgacccagatcgttccgctgtttttccaggacgtgaccaacaagccggtggaaggcatgaagccgcgcaccgcccttgaactggaaggccgcgacgtctacatcgccaacggttgtgtcggctgccactcgcagatgattcgcccgttccgtgctgaaaccgaacgctacggccactactcggtcgccggcgaaagcgtatgggaccacccgttcctgtggggttccaagcgcaccggcccggacctggcccgtgtcggcgggcgttactccgatgactggcagcgtgcgcacttgtacaacccgcgcaacgtggtgcctgagtcgaaaatgccggcgtacccgttcctcgtggaaaacaagctcgacggcaaggacaccgcgaagaagatggaagtcctgcgcaccctgggcgtgccctataccgacgaagacatcgccggtgcagccgccgccgtgaagggcaagaccgaaatggacgcactggtggcctacctacaaggcctgggcaccatcatcaaaagcaaacggtgatctatggatatcgggatgattcgtggcctgggcaccgttgtggtgatggtggcctttatcggcctggcgttgtgggtgttcagccccaagcgcaagtcggagtttgaagacgcgaccttgctgccctttgcggatgatcccgaagccatcaagcacgtcgagcaagcttctaggagtaacaaagaatgactacgttctggagtctgtacgtcacagtcctcagtctgggtaccatcttcgccctgacctggctgctgctgtcgacccgcaagggccagcgcgccgagcaaaccgacgaaaccgtcggccactcgttcgacggcatcgaggagtacgacaacccgctgcccaagtggtggttcatgctgttcgtcggcaccatcgtcttcgccctcggctacctggcgctgtaccccggcctgggcaactggaagggcctgctgccgggctacaactacctcgacaccgacaagcaaacccccttcgccaacggccagaccggctggaccggcgtgcacgaatgggaaaaggaaatggccaggtcggacgccaagttcgggccgatcttcgccaaattcgcgtcgatgccgattgaagaagtggccaaggacccgcaagccctgaagatgggtggccgcctgttcgcctccaactgctcggtgtgccacggttccgacgccaagggcgcctatggcttccccaacctgaccgacgcagactggcgctggggcggcgagccggccaccatcaaggaaaccatcatgaagggtcgccatgcggtgatgccggcgtggttggatatcctcaaggaacaaggcgtcagcgatgtggccgcgttcgtgctcaccaacctcgacgggcgcaaactgcccgaaggcgtgaaagccgatgtggccaacggcgagaaactcttcgccgccaactgcgtggcctgccacggcccggccggtaaaggcaccgccgccatgggcgcgcccgacctgactcacccgggtgcattcatctacggctcgagcttcgcccagctgcagcagaccatccgttggggccgccagggccagatgcctgcgcaggagcaactgcaaggcaatgacaaggtgcacttgctggcggcgtatgtgtacagcttgtcccatggagataagaaggctgaagagcagtaactcctcgaaagaacaaagccccgtgcagcgtaagctggcggggctttgttctttctggctcccagggttatccaagcaggaacccactaccacttgatacttgcggctcggagcaaccaagtagtaacgtaactacattcagcctgacaaaggggggagcaccccatgaccatcacgactatttccagccgcgaattcaaccaagacacaagtggcgccaaaaaagccgcccgccaggggccggtttttatcaccgatcgcggcaagcccgcccatgtactgctaagcattgaggagtaccagaaactgacagggctcaaggccgacatcgttgatctgctagtgatgccggaagcggccgatatcgacttcgaaaccgagcgagccgtgatcactcatcgacctgtggacctctcttgatgtatctactcgacaccaacgttatttctgaactgcgcaaaccccaggctgatgcaaaagtggtcgcctgggccaaaagtgtcatcgctacacgcatgtttatttccgcgatcacattgaaagaattggagaccggggtgttacgtattgagcgccgagacccggcacaaggaaagctgctaagaacctggctcaagcgccatgtaatgcccgcttttgattccaggatcctgccggtggataccgcggtcgcgctgcgttgtgcccatctgcatgtgcctgaccgggcaaatgaaagcgatgcgctgatcgccgctaccgctctggtccacgggctcaccgtggtcacacgcaatatcaatgacttcaaatccagcggggttccgttgatcaatccatgggacgaatgaccacaatacctaccaaaaccgtccatacttcccaagtcaattgatccagatcacgtacaccatcaattgatttcccccaacgcgaccaaaggtcgcaccctttgcacatcctcgggggcgtatcattaggccactgcaacaccctacatttgaccccggttggcacgtactggccgaggcaaatctccaccgccgtgggatgcaatgatgagcaaccagataccggtacatgacgttaccccgcctgccaaaaccgtcgacctctacgcctcgcgagagaaaatctacacgcgcgccttcaccggcctgttccgcaatctacgcatgctcggcggtgccggcctgttcctgctctacttcggcacggtgtggctgaactggggtggccaccaggccgtgtggtggaacctgcctgagcgtaagttctttatttttggcgcaaccttctggccccaggacttcatcctgctctcgggcatcctgatcgtcgcagcgtttggcctgttctttatcacggtgtacgccggtcgcgtgtggtgcggctacacctgcccgcaaagcgtgtggacgtggatcttcatgtggtgcgaaaaggtcaccgaaggcgaccgcaaccaacgcatcaagctcgacaaggcaccgatgggcgccaacaaattcctgcgcaaattcagcaagcacacgctgtggctgctgatcggatttgtcaccggcatgacctttgtcggctacttctcgccgatccgcgaactggtgttcgacttcttcaccggccaggccgatggctggtcgtatttctgggtcggtttcttcaccctcgccacctacggcaacgccggctggctgcgcgaacaggtgtgcatctacatgtgcccgtatgcgcgcttccagagcgtgatgttcgacaaggacaccctgatcgtttcctacgacccacgccgtggcgagctacgcggcccgcgtaaaaaaggcaccgactacaaggcccagggcctgggcgattgcatcgattgcacgatgtgcgtgcaagtgtgcccgaccggtatcgacatccgcgacggcctgcagatcgagtgcatcggctgcgccgcctgcatcgacgcctgtgacaacatcatggacaaaatggactacccgcgcggcctgatcagctacaccaccgagcacaacctgtcggggcagaaaacccacaagctgcgcccgcgcctgatcggctacgccctggtactgctggcgatgatcagcctgctggtggcggcgttcttcatgcgctcgctggtgggtttcgacgtgagcaaggaccgcgtgctgtaccgcgaaaacgccgaaggccgcatcgagaacgtctacagcctgaagatcatgaacaaggaccagcgcgaccacacctacgtgctcgacgccgccggcctgcccgacctcaagctgcaaggccggcgcgagatcaaggtggcggccggcgatatcgtcagcatgccggtggagctgtcgagtgcgccggaacagttgccgtcgagcaccaacgaggtgaaattcatcctcaccgatgccgatgacgccagcgtccatattgaagccaagagccgattcatcggcccacaagtccgctaacagggaaccgaacaatgtccgtagcaactgccgcaagcccttggtacaagcacctctggccctggatcatcattggcatcctggcctgttcggtgaccttgaccctgtcaatggtgaccatcgcggtgaacaacccggacaacctggtcaacgacaactactacgaggccggcaaaggcatcaaccgctccctcgaccgcgagctgctcgcgcagaccctgcaactgcgcgccaaggtgcacctggatgagctgaccggtgaagtcgaggtcaaccttaccggctacagcaacccgaaaaccctggagctgaacctgatttccccgacccagccggagaaggaccgcaagatcaacctggcccgcagtgacagcgagcccggacgctatatcggccaggtcaccgacaaggtcgaaggccggcgtttcgtcgagttgctcggcgtggaaggcgaccggacctggcgcatgttcgaggaagaacaagtcagccacgacaaggacttgctgctgggtgatgaaccgttgcagggtgccgaagacctgaaaaaataaaaagcctgcgcttcgcgcatcgggggcaagccccctcccacactggattgggtttacacatatctattggtgaaatcagtcaaatgtgggagggggcttgcccccgatgaggccctaccagccaccatagattcccaagccatgaccaccccctgctaccactgcgccctccccgtcccctccggtagccgtttcaccacggtcatcctcggtgagcgccgcgaactctgctgtcccggctgccaggccgtggccgaagccatcgtggccggtggcctggaaagttattaccaacaccgcagcgaagcctcggccaaccccgaggcgttgccggtacaactggtggatgagctggcgctgtatgaccgcgccgacgtgcagaaaccttttgtgcgccacgaaggcgaactcgccgaagtcaccctattgatggaaggcatcagttgcgccgcctgcggctggctgatcgagaaacacctgcgcagcctgcccgccgtggccgaggcgcggttgaacctgtccaaccaccgcctgcacgtgcgttgggccgatgggcaactgccgctgagccaactgctcggtgaactgcgccatatcggctacgccgctcacccctatcaggcggatcgcgccgccgagcaactggccggcgaaaaccgcctggccctgcgccaactgggcgtggccgggctgctgtggttccaggcgatgatggcaaccatggccacctggccggaattcaacatcgacctgagccccgagctgcatgtgatcctgcgctgggtggcgatgtttcttacaacacccatcgtgttctacagctgtacaccgtttttcaagggcgccttgcgcgacttgcgcacgcgccacctgaccatggatgtctcagtatccctggccatcggcggggcttacctggcgggcatctggaccgccatcaccggcacgggcgagttgtacttcgatgcggtgggcatgtttgcgttgttcctgctggccggtcgctacctggagcgccgcgccagggagcgcacggccgccgcgacggcgcaactggtgaacctgctgcccgcctcgtgcctgcgactcaagcccgacggccagagcgagcgcatcctgctccccgaacttaccctgggcgaccgcgtgctggtgcaccccggtgccgtgctgccggcggatggcgtgattctcgatggacaatcgagcattgatgaatccctgctcaccggtgagtacctgccgcaaccgcgccagaccggcgacgcggtcacggcgggtacgctgaatgtcgagggggcattgaccgtcgaagtacgtgccctgggccatgacacgcggctgtccgccatcgtgcgtttgcttgagcgcgcccaggccgataaaccacgcctggcgcaaatcgccgaccgggccgcgcagtggttcctgttgtgctcgctgatcgccgccgcgctgatcggcctgctgtggtgggagctggacgcgtcgcgggcgttctggattgtgctggcaatgctggtggcaacttgcccctgtgcgctgtctctggccactcccaccgccctcaccgccgccaccggtactttgcacaaactcgggttactgctaactcgcggccatgtgctggaagggctgaaccagatcgacacggtgatcttcgacaagaccggcactctcaccgaagggcgcctggcattgagagccatccggcccttggggtcgttgagcaccgacctgtgcctgagcttggccgccgccctggaaaaccgctccgaacacccgattgcacgcgccttcgggcgtgcgccattggccgccgatgaagtcatcagttcgccagggctgggccttgaaggtcgtgtcggcgagcgcgtattgcgcattggccagccgggctttgtctgcgaactcagtggttgcccgattcctgcagcaccggaggtttgcggccaatggctgttgctcggcgaccgcgacggcgccctggcctggttcgtgctcgacgaccgcctgcgcagtgatgcccctgccctgctggccgcgtgcaaggcgcgtggttggcgcacgctgttgctgtccggggacagttcgccgatggtcgccagcgtcgccgccgagctgggtatcgacgaggcccacggcggcctgcgcccggatgacaagctgcaagtccttcagcaactgcacaaggaaggtcgcaaggtgctgatgcttggcgatggcgtcaacgatgtgccggtactcgccgccgcggacatcagcgtggcgatgggcacggccaccgacctggccaagaccagcgccgatgcggtgttgctgtccaaccgcctggacgccttggtgcaagcctttactctggcgcggcgcacccgccgggtaatcattgaaaacctgctgtgggccgggctgtacaatggccttatgctgccgtttgccgccctgggctggatcactcccatctgggcggcgatcggcatgtccctcagctcgttgaccgtggtgctcaatgctctgcgcctgactcgcctgccgagcgcgccggccgtccgagccccctcaataacccgcccgctgccggtgtgagccgcgcgggcatggagtgcagatgccagctttatacgtgatgatcccggcggcgctgctcttggtgggcgtggccatctacatcttcttctgggccgtggacagcggccagtacgacgacctcgacggcccggcccatagcgtgctgttcgacgaccaggacccgaaccacctggccggcgtcgaagaggccaaccaccccgaacaaccaccaaaagacccgccccatgcttgagctggcgccgctgctggtctctgcgctgatcctcggcctgctcggtggcggccattgcctgggcatgtgcggcgggctgatgggcgcgctgaccctggcgatccccaaagagcaacgcggccgcaggtttcaactgctgctggcctacaacctggggcgcatcctcagctatgccgcggccggcgtgttgatcggccttgccggctgggcggtggcgaacagcccggcggcgatgttcatgcgcgtgctcgccggcctattgttgatcagcatgggcctgtacctggcgggctggtggagcggcctcacccgtatagaaagcctcggacgcggcctgtggcgctatatacagccggtcgccaaccgtttgctgcccgtgtccagcgtaccgcgtgcattgctgctgggcgcgctgtggggctggttgccgtgcggattggtctacagcacgttgctgtgggcggcgagccagggcaatgcctgggacagtgggttgttgatgctggcgttcgggctggggacttggccggtgctgttggctacaggtctggcggctgagcgggtaacggcgctgttgcgcaagcgcagcgtgaggatggccggcggcttgctggtgatcctgtttggaatatggacgttacccggtccgcaccagcactggttgatgggccattagatcgccatgtggcatagcgccgctccctgttgatgcaaatcaaggtggtcgccccggccagcccctagactcggcccactagcctatccgggggaacgcccgcatgctcgacgccattcgttgggataccgatctgattcaccgctacgacctggcgggaccgcgctacacgtcctaccccaccgccgtacaattcgacagccaggtcggcaccttcgacctgctccacgccctgcgcgacagccgcaaggcggtgcggccgctgtcgctgtatgtgcatgtgccgttctgcgcgaacatctgctactactgcgcctgcaacaaggtcatcaccaaggaccgtggccgcgcccaggcctacctgcaacgcctggagcaagagattcaactggtggcgtgccaccttgaccccaagcaaccggtggaacagctgcacttcggcggcggcaccccgacctttctcagccacgacgaattgcgccaggtgatgagctgcctgcgccagcacttcaatttgctggatgacgattccggcgactacggcatcgagatcgacccacgcgaagcggattgggccaccatgggcctgctgcgcgagctgggtttcaaccgcgtgagtatcggcctgcaagacctcgaccccgaggtgcaacgggcagtcaaccgcctgcaaagcctggaagaaacccgcgcggtgatcgatgcggcacgcaccctgcaatttcgttcgatcaatgtcgacctgatctacggcctgcccaagcaaacgccgatcaacttcgcacgcaccgtggaagaggtaatcaggctacagcccgaccgcttgtcggtgttcaactacgcccatctgccggaacgcttcatgccccagcggcgcatcaacaccgatgaactgccgtccccggcctcaaagctgctgatgctgcaaaccaccatcgagcaactgacccaggccggctaccgctacatcggcatggaccacttcgccctgcccgacgacgaactggccatcgcccaggaagaaggcaccctgcagcgcaatttccagggctataccacccacggtcattgcgacttgatcgggcttggtgtgtcggcgatcagtcagattggcgacctgtactgccagaacagcagcgacctcaacggctatcagaacacgctggcgggcgcgcaactggccaccagtcgcggcctggtgtgtaccaccgatgatcggttgcggcgggaagtgatccagcagttgatctgcaatttcagcctggacttcgagaagatcgagcaggcgttcaccattgattttcgcggatattttgccgagatctggccgcaactggaggccatggccgaggatggcctgatcaaactcgacgcccaaggcattcgcgttttgccagccgggcgcctgctggtgcgttcggtgtgcatggtgttcgatgcctacctggagcaccagaacaggcagcggttttcgcgggtgatctgaaacaccctacgccatagcgagggagccggccttcaacgcgtcttccccgctgaggcctttcatggccttggccagggaggtttgtgcagtcaccaggctcgcctgcaactgggcgagtgccccttgcagattgctgaccttgatccgcgcctcgtcggggctgaggctcttgtccgccatcacggcttgcagttcggcctgtttctcggcgatctgctccttgatcttgcgaatcatcttgaggacctgctggacactgtccggcagaccgctgtcttcgatgtccttattgggtttcttggcctccgtcagggctttcaaggcagcaccggaaaaggtcaccttcaccccctcctcgtcctttttctcccgcaacggcgcttcagtagcgtccttgagctctttggcagccttggcgagcttggcctctgccaccaggtctttcggctccgcaaaggactgcacctgagcgcctgccgagttcattgcaccgatggaaatcatgaatagagcctccaggctcaagggttcgtgactttgtatcggcggcgacacaaaattctttataccgttgctggttttttgtacacgctggcctcaccggcccccagtgcgttacccttacgtcttatgtgtgttttcccacaaggatttaagaaatgtccgagccagtcaaactgcgcgctcacagccaggctcattgcaaggattgcagcctggcccccctctgcttgccactttcgttgaatctggaagacatggatgcgctggacgagatcgttaaacgtggtcgcccgctgaaaaaaggcgagttcctgttccgccagggcgacaagttcgattccgtttatgcagtacgttcgggtgcattgaagacgttcagcctgagcgacagcggcgaagagcagatcaccggtttccacctgcccagcgaactggtgggcttgtcgggcatggacaccgaaattcacccggtgtcggcccaggcactggagactacatccgtgtgcgaaatccccttcgaacgcctggacgaactggccctgcaattgccgcaactgcgccgccagttgatgcgcgtgatgagtcgcgaaattcgtgacgaccagcaaatgatgctgctgttgtcgaagaaaaccgccgacgaacgcatcgcgactttcctggtcaacctgtcggcgcggttccgtgcccgggggttctcggccaaccagttccgcctgagcatgtcgcgcaacgaaatcggcaactacctgggcctggcggtggaaaccgtgtcccgcgtatttacccgtttccagcagaacgagctgatcgccgccgaaggcaaggaagtgcatatcctcgacccgatccagttgtgcgcgctggccggtggttccctggaaggttgacgcagacacttgcggccgcgccaaccggcgaggccgcaggtatacttcgagtccgtttccagccccaggactcttcgacgatgaccttcgattcgttcgacatcaaatccctgatccgtcccgtcatcgacttccccaagccgggggtgatctttcgtgacatcacgccgctgttccaatcgccccgcgccctgcgcctggtggccgacacctttgcccagcgctacgtcgagaccgatttcacccatatcggcgccatggatgcgcggggtttcctgatcggttcgatcatcgcctaccaactgaacaaaccgctgatcctgttccgcaagcagggcaagctgcccgctgacgtgctggccgagggttaccagaccgagtacggcgaggccttcctggaagtgcacgccgacagcctgtgcgaaggcgactcggtgttgatgttcgatgacctgatcgccactggcggcaccctgatcgcggcggcgaacctggtacgccgcatgggcgcgaagatcttcgaagcggcggcgatcattgatttgccggagctgggtgggtcgcaacgtttggaagatatgggaattccaacgttctgcctgacgcagtttgcgctgactgaacaataacggttgcctgggctgatgccatcgggggcaacccccctcccacacttgaccggttcacagatcaaaatgtgggagggggcttgcccccgatgaggcgctgaaaggcactaaagatcagaagcccatctgcttactgatgatttcattcatcacctcgcgggtaccgccaccgatggagaggatgcggttgtcgcgatacagccgctccaccaggctgccacgcatataaccctggcccccgaggatctgcaccgcgtcgtaggtgacgcggtcggcggtgtcggtggcaaggttcttggccatggatatctccttgatcacgctgataccggcggccatctttgctgcctgccgataagtgaactcccgagagacctccacggcggtggccatttccgccaggcgatgcttgatcacctggaatttgccgatgggtttgccgaaggcttcgcgctcggcggcccatttgaggctttcctccagggccagttgcgcggtcatgttggccatgagcgccagggccaggcgctcgctctggaagttgcccatgatgcaggcaaaacccatgttttcggcgccgatcaggttgcctacgggcacccgacaatcgtcgaagaacaattcagccgtgtccgacgcccaccagcccattttcttcaggggctggccgacggtaaaaccgggggtgtctttttcgatcagcagcaggctgatcccggcaaagcccggcccgccagtgcggacggcgacggtgtagaaatcggcgcggatgccgctggtaatgaaggtcttgctgccgctgacgcgataatggtcaccgtcgcgaatggcgcgggtctgcaggctggccacatcggaaccaccgcccggttctgtgactgccagggcgatgatcttctcgcccgacagcacctgtggcgcgacgcgctcacgcacgtccggccgcgcccatttgacgacgggcggcaagccgatatccagcgagcccagccccgccacgacgccgccagaaccgcagcgcatcaactcttcgctggcggccaccttggcgaacagatcgccttcatggctaccaccgaggacttcgggataaccgatacccaggatccccgccgctcccgccttgaggtacaactcccggggaaagctttcggcttcctcccagtgctcaatccccggcagcatctcgcgctcgacaaagcgacgcacgctgtcgcggaccaattggtggctggggtcgaagtagtcctgataggcagacatcggcaagctccacggtgaggtggagcgaaattaccaagcgcttgcttggttatcaagccgtgccgtcagagggcgatcggtttgcggccggcaaacgaatgcgccagcgtgccaccatcgaccaattccaactcgccacccagcggcacgccatgggcaatgcgcgaggtgatcaggcctttgttggtcagcagttgggcaatgtaatgcgcggttgcctcaccttccaccgtcgggttggtggccaggatcacttcggtgaaagtgccctgctcttcgatgcgcgccaccagttgcggaatgccgatggcttccgggcccaggccgtcaaggggcgacagatggcccttgagcacgaagtagcgcccgcgataaccggtctgctccaccgcgtatacatccataggcccttccaccacgcacagcagcgtgtcgtcgcgacgcgggtcggcgcattgcgggcagagttcttcttcagtgagggtgcggcactggcgacagtggcccacgccggtcatggcctggctcaaggcctgggccaaccgggtgccgccgctgcgatcacgctccagcagttgcagcgccatacgctgggcggttttctggccgacacccggcaatgtgcgcagggcgtcgatcagttggcgaatcagggggctgaagctcatgggcgaagggtccgacaaaacaacgagacgcggtttatacccgcgccccggattagcgtcaaatgcgcaccaccaacttgccaaagttgcggccctcgagcaaaccgataaaggcctcgggagcctgctccagaccgtcgaccacgtcctcgcggaacttgatcttgccgtcgcgcacccacggcgccatggcgctgaggaattcaggctggcggtcaccgtagtcatcgaacacgataaagccctggatgcgcacgcgcttggtcaacaaggtacgttgcagtgtcggcaaacgatcaggcccgctgggcacttcatgggcattgtagccggcgatcagcccgcacaacgggatccgcgccttggggttcaacagcggcaccaccgcgtcgaacaccttgccgccgacgttttcaaaatagatgtcgacgccgttgaagcacgcctgggccaggtcatcggcaaaggtcgcgctcttgtggtcgacgcaggcatcaaagcccagttcgtccactacatagcggcacttttctgtgccccctgcgatcccgaccacacgcaagcccttgagcttggccacctgccccaccaccgagcccactgcgccggatgcggccgccaccaccagggtttccccggccttgggttgaccgatgtccatcaggcccatgtaggcggtcatacccggcatgcccagcacgcccagtgccatcgacgggctgggcaagcccttgggcaccggcatcaggttgcgaccatcggaaatactgtggctctgccaaccggtcgcgcccaccaccaggtcgcccacttcgaatttcggattgcgcgactgctcgatacggctgacagcaccaccggtcatcacttcgtcgatttccaccggcgccgcataggacggagcgtcgctcatgcgcccacgcatgtaggggtcgagggacaggtacagggttttcagcaggacctggccgtctgccagttccggcaggttcacccgctccaggcggaaattttccggggtgggtgcgccctgggggcgtgagaccaggacgatgcgctggttcagggtcggttcttgaggcatgaaggggctcctttatcgattccatcggtatagggtgcagaccatgcgtggcgtgccagggttcatattggacgcgaagcgtcggggggcggcattcccacgcagagcgtgggaacgatcagcccgctcgccacaacacgaacaaaaatgccaggcacaaggcctggcattggagtctagctaaagctcgtcgatcagaacggcagcttcatgcccggaggcagttgcatgcccgcggtgacgccgcccattttttcctggctgttggcttcgatcttgcgcacggcgtcgttgacggccgcggcgaacagcgcctcaagcatttccaggtcatcttcgcccacgcctggcaggacgctcgggtcgatgctcacgcgtttgatgtcgtgacgaccggtcatcaccacgctgaccatatcgccaccggctttaccggtgacttcggcgttggccagttcttcctgcatcttggccattttttcctgcatctgctgcgcctgcttcatcaggccggccatgccacctttcatcatgggaatcacctcaaaagtacgtggatcaataagtagcccggttttatgacgcctggggcaccggggcttcgacaggttcaatagtatcgtgacggacgaccgcaccgaactgttgcatcatttgctggatgagcggatcggcatggatcgaatcctcggcctcacgctggcggttgatgcgccggcgggtcgcggcctgggccggggtttcctgctcgggcttgatcagctcgatggcgatggtcaacgtacgctcatggtactggttcagcgcatcgttgagacgacgctgttgggtcgcgttgaacagggcgctgtgggccgggtccaggtgcaacaaccagtggtcgccttcaatggaaatcagcgtgcagttggcggcgatgctgccggtcatgccggagatcggcagtttcgggaacaactccagccattgcagggccaggccggtggccggcgccgcagcgggctccgcttccggctcgggggccggttcggcggtgtgctcgctggccagatcgtccaggtagctgtaggccgaatccatgtccggctcgatgtagtcttcgtccagcggtggctcgtcgtcgaggtcgatgcccggcgtggcggcttccacctgcgccacggtgggctcggggacgggtgcagagacccattcgggagcatccggcaccacgctgtcgggagtcggcgtgggcatcggcgtcagctcgggttgctcgccggtggtttccagcacgggctccacggcgggcacttgctcggcctcgacttcagcttcgaccggatcattccagggcaggtcgacgacgggctcaggctcgacaacaggttccggctcgaccactggcgcagccgccacaggttcaggcaccggcgcaagagcaggcgcagcaaccactggcgcagcaactgccgcgccagccactggtttggcggaatcaactgtggcctggctgatccccactggctttagcggctgtctcggcgcgtctgccgaatcggcgggccggaaggccagcattcgcagcaacaccatttcaaaaccgccgcgagggtcgggcgccaggggcaggtcgcggcgaccgatcaggcccatctggtagtagaactgcacatcttcggccggcagcgcctgggccagggccagcacgcggtcgcggtcgccatggccgttgtcgacgccttcaggcagcgcctgggcgatggcaacacggtgcagcacgttgagaatttccgagagcacgccgttccagtccgggccttgctccgacagatggcgcacagcttcgagcagcgccttggcgtcgccttcgatcagcgcgtgcagcacgtcgaagacctggccgtggtcgagggtgccgagcatggcgcgcacgtcggcggccatgaccttgccttcaccaaaggcgatggcctggtcggtgaggctcatggcatcgcgcatcgaaccatcggcggcgcggccaagcagccacagcgcgtcgtcttcgaacggtacgttttcgacgcccagcacatgggtcaaatgctcgaccacccgctcgggggtcatgtttttcagggagaactgcaggcaccgcgacagaatcgttgcaggaagtttctgcgggtcggtggtggccaggatgaatttgacgtagggcggcggctcttccagggttttcaacagggcgttgaaggaatggctggacagcatgtgcacttcgtcgatcaggtagaccttgaagcggccacggctgggcgcgtactgcacgttgtcgagcagctcgcgggtgtcttcgaccttggtgcggctcgcggcgtcgatctcgatcaggtcgacgaaacgcccttcgtcgatttccttgcacaccgagcaggtgccgcagggcgtcgaagtgataccggtttcacagttcaggcatttggcgatgatgcgcgcaatggtggtcttgcccaccccgcgggtaccggtgaacaggtaggcgtggtgcagccgttggctgtccaaggcattgatcagagccttgagcacatgggtctggccgaccatttcgcggaacgagcgcggacgccatttacgtgcaagaacctgataactcatcgaaaaccgtcgcaactgggaagcggaagccggtaatgctagcggagcaagggggaaattgcatccggcacgctcgcctaatctgactaagcttgccgggttggccccaaaaaggcctgaacccggagtgtgtatgcgcgtagtcctgggcgctttatggatgatcaccacggcttgcctggcagcgcccgcaccgttgcgtttctcggtttccgacagctgggcgatgcccctggtgcaattggagggcggccggcccacccagggcattttgtatgacctgatgttgagcctggctacccaggtcggcaggccggccgaattccatgtgttggcacgggcgcgtatctccagcgccatggagcatggcgatattgatgtgcgctgttatgtcacccaggcctgggtcgacgacgcgtccggcgattacgtctggagcgtgccgctgatggtgcagcgcaacctgttggtcagcacccacatccccccgaagccggtagagctggacacactcgcgccgcaggcgatcggcaccgtgctcaattaccggtatacgaccctcgacccgctgttcgccaaagaccaactcagccgcgacgatgcgcgtagcgaagagcaggtgctgcacaaactggtggccgggcgcttcaagtttgcggtgagcaacgaatggatactcgaccgtttcaaccaacgcctgccggtcggcaaacggctgcacaaggttgtggtgattgatgagcagcgcctgggctgtatcgtgcgcaacgccccgaatgtgccggtgcagcagatcctgcgcaccttgctgcgcatgcagcagtcgggcgagatcgagcagatcatccggctctacaccggtgagactcctgacagaaactgacagtgccgccttatagacttggcgccatcgaacacgcattcccaaggagcctgcatgaacaccctcgcccattacttcctgctgtacgtcgacagcccggccaccagcgccaacttctatagccgcctgctggacaagccgcccgtggaactcaacccgaccttcgccctgttcattctcgacaatggcgtaaagctggggctgtggtcgcgccataccgtggaaccggcgacccaggtcaccgggggtggcggcgaagtgggcttgtccctggctgacaaagccgctgtggacacactgcataatcaatgggtagcgcgcggcgcaaccatcatccagtcaccgaccaccctggacttcggctacaccttcgtcgcccaggacctcgacggccaccggctgcgcgcgttttgcctgagcgactgaccgccagcgcccctccaggctgatggcggctacactggccaacacgatcacaccgcccagcaccacttgcagggcgatgtgctcaccgagcagcgttgccgccatcgtcatcgccaccggcgggatcaggtacatcgccaccgatgcgcggctgacctcgacatgtttcaacacatagccccaggccaggtacgccagggcgctggggaaaatcccgagcaccagcaccgcgaggttctccggcaacggcgcctgcaccacggcagccgacaggcccggcaggttcacacagagcatcaaggtgccggcccagaccatgtagcaggccatcgtcagcgggctatagcgatgggcgtaatgtttctggatggcgaagtacaggctccatgacaccgccgccagcaggatcagcaagccgcgcgggtcgatatcgcccacgccgtgatcgccccagatcaccaccagcacgccgagcaaacccagcagcacgcagctccagcgccagaggctgacccgttccttcaagcagaagaacgcgatcaacacgctgaacagcggcgccgattgcgccagtacactggacgccgccgccgtcacgaactgctggccgtaattcaggctggtgtggtgcaggaacaccccgaaaaaactcaacaccaacagccacggcagatccctcagacgtggccgaccgatgcccagcatcagcgccacaccggccatgaacagcgaggcgatcagaaaccgcagcagcgcaagctggccagggctgtagctgtgcaggccgatgtgcacgccaatcggcgaataggcccaacagaggatgacgctggcgatgactagcgtaagcttcaggggtgacggggtgttcatcgacggcatccgaaacggggaaggaatgccgtcagtcttcgcccgagcaacgcgcaggacaattaaccgtttctgacttctgaaatcactggaactgagcaatggaactggcccaattgaaaatggtgcgagccgtggcgcaaaccggcagcgtggcccaggccgccgtgcaattgcattgcgtgccgtccaacatcaccacgcgcatcaagcagctggaaagcgagttgggcacaccgctgtttatccgtgccggacgcgggctggcgatcagtgcggccggtgagatcttcctggagtattgcgaacgtatcctggcgctggtggacgagtccaaacgcgcggtcgacgccaacgcgattccccgtggcaccctgcgtatcggcgctgtggagtccagcgccagcggacgcctgccgccgttgctggccgaataccatcggcgctacccggatgtcagcctggagctggtgaccggtgcctggggcgaactgctcgatgacctgcaacaccaccgcctggacgtggcgctggtggccgccggcaacaaacgcgcaaagctcgaacacagcgtggtctacagcgaacgcctggtgctgatcgccagcgcctccagcgcaccgatccgcagcgccgaagacctggccggtcgcacgctgctggtatggccgcccggctgcccttatcgggcggcgctggagaactgggtcaagccccacgcgttcaagccggccattgccagctatgccagctggggcacgatcatcggttgtgtcagtgcgggaattggcgtggcactggcgccggaaggcatcctggcccgctatgagcaggccaatcagctggcgtcgtaccggttcgaggaactgcaggcggtggacaacctgctgttctggcacaaggacacccagcggcacctggcgcgggatgcgtttgccgggttgttgcgcgaaactttcggctgatcagcttttgggggcagccagatggctgtactgatcctggctgatccacccggtaaacgagcggtcatcggcattgatgaactcgacctgggcccagccatccttgaaggccagcactccaaccacatcattcttgacgatgtacggacgcttggcggccttggcacttgggtttttcagcaggtaagccttgtcggcggacaccttcaccaggccgatccatttcgtgttggcggtctggctcaggtccaggccggtggcgatctccggcatcagcacattgaggcaacccggatgctggcggccttctgccacggtcagggtcacaccatcggacgagggtgccaggctgccggggtaggtggcgtcggcccaggtagtcagcgcagcgggtttgccttgcaggtagaacgtgcaactgcgggtgacgccctcgcccatcgcttccgagtagtaaccctccacctggtgctcaggcgtcaccgccagcatcagcccttcatacttgcccgaatgcaacgcgggcgaaccggcaaacgcaggggctacagcgcacaacgacaacacaccgatcgctagaaaacggatcatcttattttttcccttcaagtttctcgtaggctttttgcataaggacgtcatagttgccgtagtcctcgccgttatagttacgcgccatgccggtaaaatccttggctttcatggccttcatcaacgccgggctcttgctgcaaaaaccgaggaaggcctttagttggttaccggcattcacttttaatgccgcagaaaattcaaacaccgtcttgtaaccgcaggacgcgtagttgaaacccatgatctgaaacatgccccaggacgccgacatcaacgcggcttcctgatccagcgcaaacgcggtggccatggtttcccaggccttggtctggtccttgttattggtctgccactgtggcccggcctttttcttgtaggggtaggacagtagcgggtgcgcctggtcgtagatgtgcttggtgcacttgcgaaacaggtgcccttcgaaggcgattaccggcaatttggccgggccaaaacctgaacggccgccggattccacggtggcgaaggccttgatgatgttcaccgaaataccaccgcccaactgcgtggccgcgttctggaaatccgtctcgctgagggtcatgcccccgtcgcacgtggcctgcagcatcaattgacggttgcgcttctcggcctcgatcatcgcgcgcatgcggtccaggtacacattgaccgtggcctgcaccgcgtcaccctgattgttgccgaacacattcagaaagctcgggatacgcatgctcgggaacgcctttaccggcaccttcaccgcttcttcgatcaggctgttgaaggttttaccggtcgggtcgatcacgctatcagggtgggcatatttgagatgacggaattgatactggctgatgcattgcaccaattggccatcgcacttgccgttttcggccagcgggaagcccatttttggaatgatcagattgaacaagtattggacgcactgcacatcggcgggcaagttgcgggctttgccgggcgcgcctaccgaagcactgataagacggggcaacccttgcaggcttttcatcacagacatccttgttagttaaaaaagcgatggcacttcaatatcaacttcacacacttgtcacactctgaaacaagtggctggcggaaactaacaaggtggttttgggttgtaaagcatgcaattttaaagttgtgaaatagctatcggataacgtccagcacctggcatttctggtgagtcgcgtcagactctcgtaacgaaatggggtggagggacgcctgcccggtcaggtttgcttagcgtttccatgatttccctttaatatgcgatacccgcccaccaagcagagggatgcgctcaaatgcccggccagataatcgaatcggagaaacgactgtgaggctcgacaaactgcgcgtgcagaattaccgctgttttggagagtttgagatcgacttcgatcctcatctgaccgtcttgattgcatccaatgggggcggtaaaaccaccattctagatgctgcacgggttgccctatggccttttgtaaaaggcttcgacctcggaagccagaccggaaaatccgcgacaatacaaatcgacgatgtacgtctagccaatctctccagtggcaacatggagcctcaaatcgccagcattatcgaagccaggggcgtatgggcgccagacgaggttgaaagccattggttacagcagcgcacgagcttgaaaaaatcgaccaatacccttggtgatttgggttcgaaagctctgacgggatacagcaagtctcttcaggaaaaagtacgcagtgatgagaccgtcgtcttaccgttggtgagctacctcgggacgtcccggctttggtacgaaggccgctttacttcggcggcagcccaaaccacgctcgacaagtctgaatactccagaacatcggggtatctgaactgcctctcctactcgtcaagtttcaaaacgtttaccgcatggtacggctgggtctatcgcagctatcgggaagcgcaggtgattgctctggaacgcaatgcacagctaaccgatcttggtgttcggttcgcgcagatcatcaagtctgtcaaagcggcaattgatcaattgttacaggctccgacaggctggcacagcctggagtacagtgagagccatcaacagcaactgatcatgcaccatcccgaacagggcatattgcctgtagaaatgctcagcgacgggctgcgcaataccattgccatggttgctgatttagcgtttcgtgcctgcaagctcaacccacacttaggcgaaaaggctccgttacaaactcccggtatcgcactgatcgacgaggtggatatgtttctccaccctcactggcaacaagtaatactcggatccttgcgatcagcttttccagcgatgcaattcattgttactacgcatagcccacaagtattgagtaccgtacgacgcgaaaacattcgagtcattggcaaggacacgcacggcaacctggttgcctcacccccattggcaatgacctatggcgagcccagcaatagcgttttacacagcgtgatgcaggtagatccgcagcctccagtacttgaaaaaccagatttgttgctgctcaccgaatgggtggacaagggccgatacgacgagcaacctgccgttgaattaatggagcgacttacacgcgtattaagcgatcagcaccctcaacttcagcgcctgcagcgcagcatcaaacggcagagagcacttagaaaatgagggctattcaaaagcggggccttggtcctcatcaattgaataactcacatgcaaatccacccattacagccaaggcggctaccagtcgatggtcagggtttggctacaaacaacaggttttgacctatctgctggaagagcagtatgggctgtgctgctacagtgagatcagacctgatcaggtcggtctaggcctacacatagagcacgtcgaaaataaaagccagaatccacaacgtacctttgattacaacaatctggctgcttcagcattggatagccaaaccgatctgcacaccttcaaggggctcgcgtcagcagtgttcggcggtcacgccctgggaaagtcggacgcggtagatgtccatcgttttgtatcctgccaccagcctgattgcagccgcttttttgcgtacctttctgatggtcgcattgtgccggctgacgggttatccctggaagatgaagaccgagcgtcatacaccatcgccttgctcaacctgaatagcccatttcttcaagacttgcgccaacaatggtgggacgaactggaagcgcttttcgatgaccacatcgaacaggatatgagccttcattgccttgcaggtattgatctcattcctcgagaaaagcgactaagtccgttcttcagcatcacccgaaatttttttggccaaattgctgaagaagtgctggatcaagatgcacctaatctgaagtagttgagacctatgacttgatcagtaaccgtggaactccctggttttctgataggtgtggaaatcaatccactcgactacatcgtaaggcaggtaaagctgcatccgcgcgcgggaaatggcgatatacacctcgcacagccgttggtcgaacgcgtaggcgtccttgaacttcacgttggtcagcaactcgggcgtcagcaatacccggtcaaactccatgccgcccgcctctgccgccagcattagcaggcaacgcttgccgggcacgccgcccagtcggttcaagcgtgtgatgtcggcgacgttgaagcctttttccaactcgctctcgacccacagaaacgcttcatcgaactggctggcatcgcgcacctgttgccaatcgtccatgtcgctgaaatacgcatggggaccgttgtcgttgtgctcgttgctgtagaactgcggcttgaacaaggcgatgacgctgatcatgaagcgctgcagatcctgctgcgctgcagtgtcgaagaacccgaacgggcagttggcctgctgcaactggatggcccatttcatggtgtcccaatgggaggcggtcaacaccacgcagccttccggcggtacgaagccctgggggtaatgttcgatgccgacgtccgcgtcccgtgcgccttcgaagggggtcttgcacttttgtgagtgcacgctgatcaacgggttgaccaggcgctcgacgttgcggcccgagcgcaccgagtaactgatgtcggtgtgccggacttcgcgctttcttcgcaccatcacaccgctggccaattggtattcatcgccgagggtgatcaatacctggcggccacgctcgataatctgcaacaacgaaggcgggatgtcctggctttcatcgatcaacacgtgggtatagcgaggcggcaccacacagccttcgagactcgcacgcttgatcagccacaatgccgcgaaggcagtctggccggcccactgtgggttggcctccaggtacgtccacaaccggctggaatactccagcaacgcctgggtatccacgctggacaacgggtgcttgaaatgcggcaggtgcctggccgacaggctgtgatgactggagtggcaatagctttcgagcaccttcagacagatatccagcgtcgccacgccctcgtgcccccgccagccgtggatattcagggtctgcgacacttcatgcttgccgggcaacctggcaggcgtgccctgcacggatgggcgcggcccctgcagcagcgccttggcgaacgcggcgaaggtcgaacccgccttgctgtccttccccaaccccatgcgctcacgcagggtcgccagtttggcccctgtgcgtgccagcaccagggtctgggcggggcgcaggcactccatcaaggcgccgagcaggtggctcttgccgatgcccgcgtagccctggacatgcaggtcttcattgaggttggcgcggaaggtacgcaccagtttgtcctgggccgggctgagccagcgctcacgctggcggggcgtgatcatctgttggctgaatggatcattgctgcgcaggtggcggaccttatagccgatatcccatttgcccgtaggcagcaggtaatcccgcgccgcgacttcttcagccgacagcaggcgcaggttgacgcttttaagcgcgttgaaaccgaagtagagcttgcgcggatcgaacagtcgctgggcttcggacagcagcgtcgcagcgccccctgcccgcgtgtcgaccgaccagtcgagcaacttggccaggatgcgttcggcgcccgcgcaggtcaggtctttttccgcggcctgggccaggttctggatgaccagtacggcggccagttccgggtccgtcaggccagccagggccagggcgccgtccgtaccgagcagggccgtgcaggtttcatccgtgacaggcaggaagaccgggctggataaatcgaagtgttcaggttgcatagtgcctcgccgccagggaatcaggcattgccctgaccgcccagttcaaaccgatactcgcccagggagcccgacataccgccgcaatgagggcctgcgtcagccgcagacgccatcgcattgatctgttgctggagttcgaacacagccatatcgagcaaccgccgcaagtcttcggcgctctgcgcggccacgttcaattgcagcgtgcaggcgcccgccagcggtggctgcgcgggctcgtcaacgacttccgcagagcggatcatttccgcctggctgaggatttccgcgtgttcatcgtccatcaggtccagcaccctcgacaattccagggtctgctcagggtgggattgaatgcggtccttgatctccaggcggcgcatctgccattcccgcagtttttcgcgagtgaggtcgtcgactttttccacgtgtgctgtctccggatgccaggcactggagtatgccgccatggactgcccgatggcagatggcgtgaaagcatttttgatttggatttgaagaggtattgcaaggaagagcgttatggaggcaaccccaccagccacaccccggcacacaatgttcccgctgtggctgctgccttccggctctgaccaggttcacgggtaatcgttgcggggggaccgatggggtcaccataacgacgctggcctctcggcaagcggggccattgtaccgatctcatcggaagttacaaccgttggggccggattaaaaatatgaaggggttcaagtacttgtcaccgtcaacggcatctgtgggagggggcttgcccccgatgacggtacatcagccaataaacaggtgactgacccagcgccatcgggggcaatccccctcccacagcgctcatcattgtgccagtaccacctcatctgctcggccgccttcttcctggatcaccaggtgaatgaagtgcagcttggcgatcaccgctggaggcagcacaaagggataaaaatccggctggcccatgctgcgcgacagttcgttgagcatgccagccagttcgatccaagcgttgacgaatgacaggaatgccacgccgcccgggtgttcgggatcatagagcgtgctgaggggaaatggctggtaatccaggtccatctcgcgggcgctcatgccaaagccgagggcggtgtcgacggcatccatcatgtgcaggtagtgcgcccaggtttcagcccagtcttcccaggggtgcatggtggcgtaggcgctgacgcaggtttgctgccaatcggcgcgtgggccgtgctggtagtgctggtcgagggcgtcggcataactggcacgttcgtcgccgaacaggttgcgaaacggttcaagccagtgggtattggcgatcaggcgatcccagtaataatggccgacctcatggcgaaagtggccgagcagcgtgcgatagggttcgcgcatctggacgcggaccttttcccggtgggcgtcgtcggcttccttgatatcgagggtgatcaggccgttcgcgtgaccggtcatgggcgcgttgccctccaggtcgataccgacaaaatcgaaggccaggccggtgtcttcgtcgacgcttttgggcaccacttgcaaacccaggctgatcaattgcgcgaccaaccggcgcttggcggtttcgactttgcgccagcgctcgtggttttccgggatcgacaggtcaggaatggtgcggttcaggctgcatgccacgcacagcggcgcagtgctgtgcgccgggatcagccagttgcaggcggccggggtgtcgaggttggcgcagcggcggaaggcgccggcgtcgaggttaccgtcctgcagccaggtgccttcgaccgggccgggctgcagggagtccagccgggcttgttggggttggtagcccagcagcgcctggcaggccaggcactggctgttgcgaaagaacagcgattggccgcagcggcactgccacaccttgctgtcgcgggatgtgccggctacgaacggtgcagcgatgcgcgaactgagttgctcgaagtagcggaacatggcgatctctccctgggtgactgagactagatcactttctgttcaggatcgttccactttcgttagggttggggggctgctgcgcagcccgacgcggggcaagcccgctcgccacagcaagcccgctcgctacaaagtgcaaatcagacggtgatgttgtgcttggcaaggaaggagacgaaggcttcttcatccaataccttcaggcccagttcgctcgccttggccagcttggaacccgcccccggccccgccaccacgcagtgggtcttcgccgagacggaacccgccaccttggccccgaggctttcgagtttttccttggccacgtcacggctcatcagttccagggagccggtgagtacccaggtgtgccccgcttcgggcaaaccttcgacgaccttcttctcgctcaaccagtgcatgccgaagtccttgagctgctgctcgatggccagggcatggttggcgttgtctgcgttatcgaagaactcacgcacagccttggcctgcttttcgggcagcgcctggcgcatatccagccagtcggccttgatcacgccttccaaggtgccgaatttgtccgcaagtttctgcgcggcgccggggccgacgcttggcacatgcaacttgtcgagcaagccgcccagggtggtactggcggcgaattcggcactcaggtcgccctggtcctgcaattgcaggccgcattcgtctggcgacagcagcgcaccgatcacgtcctggttatggctgtcttcaaagaagctgtggatctcgtgcgccacttccaggcccacgtccggcaggtacgtcagcactgccggcaaggctttctgcacgcgctccagggatgccagcgaacgcgccaacaccttggcggtctcctcgcccacgtcgggaatgcccagggcgtagatgaaccgcgccagggtcggggtcttgctgttttcgatagcggtgatcagcttcttgctggaaatatcggcgaagccttccaggtcgatgatctgctcgtacttgagcttgtagaggtcggccggcgagccgatgagtttttcatccaccagttgctcgatggtcttgtcgcccaggccatcgatgtccatggcgcggcgcgagacgaaatggatgatcgcctgcttgagctgcgcaccacaggccagacgcccgacgcaacggtacaccgcgccttcgctgacggtttccttgcccttgctgcgcttgaccagttgcgtgcgctccacatgggagccgcacaccgggcagctctgcgggatcggcaccgcacgggcgtcttccgggcggcgctcaagcaccaccgacaccacctgcgggatcacatccccagcgcggcggatgatcacggtatcgccgatcatcacacccaggcgcgcgacttcgtccatgttgtgcagggtggcgttggacacggtcacgcccgcaaccttgaccggcttcaagcgcgccacaggcgtcacggcgccggtgcggccaacctggaattccacgtcgagcagttcggtcagctcttccatggccgggaatttatgcgcgatggcccagcgcggttcgcgggcgcggaagcccagttcacgctgggaggcgatgctgttgaccttgaacaccacaccgtcgatctcatacggcaggctgttacgccgctcgccgatgtcacggtagtactccaggcaatcctgaatgcctttggccaacttcagctcatggctgatgggcatgccccactgcttcaactgttgcaggttgccgatgtgggtgtcgctgatatcggtggtcacgccgtagcagcagaactccagcgggcggctggcggtgatcttcgagtccagctgacgcaggctgccggcagcggcgttgcgcgggttggcgaaggtcttgccgccgacttccagttgcgcggcgttgagtcgctcgaaaccggccttggacatgaacacttcgccgcgcacctccagggttgccggccagccactgccgtgcagtttcagcgggatgttgcgcacggtgcgcacgttgacgctgatgtcttcgccggtggtgccgtcgcctcgggtggcgccgcgaaccagctcaccgtcctgatacagcaggctgaccgccaggccgtccagcttcggttcgcagctgtattccaccgccgcgccagcgccgaacaggtcgcccaccggcaggtcgaggccttcggtgacccggcgatcaaactcgagcatggtggtttcatcaaacgcgttgcccaggctgagcatcgggatctcatgcttgacttgggtgaacgccgacaacgccgcactgccgacccgctgcgtcggagaatcgcgcgtcaccaggtccgggtgctcggcctccagggccttgagctcgtggaacaagcggtcgtactcggcgtccggaatactcggctcgtcgaggacgtggtagcggtagttgtgctgatccagttcagcgcgcagttcgaggatgcgggtgtgggcggcggtcatgggtgttctctcataaagcaaaagagcagccgaagctgctcaatatgttagtgcacggattctacagacaacgcttaagatcggacctcagcgcttctgtgtcagggcgcgacgctcgaactcgacgatgcgctgacggtagtgttcgatggtttgcgcggtcagcacgctgcgctggtcgtccttgagctcgccattgagctcctgggacaacttgcgggcggcggccaccatcacgtcgaacgcctgcttcgggtgacgcgggcctggcaggccaaggaagaagctcacggccggggtgctgaacaggtcgatatcgtccaggtcgaaggtgcccggcttgaccgcattggccatggagaacagcacttcgccgttgccggccatgctttcgtgacggtggaagatatccatctcgccaaaccgcaggccgctttcgaggatgttctgcaacagggccgggcccttgaagccagcagcgtcgcggcagatcacgctgatcaccagcacttcttcggcggccggctggtcgttcacggactggcgcggggcattcttgccggcgttttcgtcggggaaatcatcgtcgcggctgctgaagctcgggccgtcattgacgtcaaggtccaggtcagcctggcgcggttctgcgaccaccggagcggtgcgcttgccacgcttggatgacggctcgcgggcttcacgcaccggcgcgctcatcgacggcaagtcgtgctcgtccagttgcggttctttatgggtgtccagcacacggggcggccccagcagctcggcgctgccgtcgtcgtcgggcaagttggacaggttgcggtccagacggaatttgagcttgcccttgccaccgcgcatgcggcgccagccatcaaaaagaataccggcaatgacaataatgccgatgacgatcagccactcgcgcagaccgatttccatgtaatcccgtgcctctaataaaaaatgctgaaaaataaggggtttagcaacgtgcaaaccgctttaaaacgtggcgccaactctatgttctgactgacgttttgcccacgcatacgaaaatttgacattaaactagcacgaccaaagataactttacaccgtctgtcaaaatgccttgaacaaatatgtccatttgccactttcgccagaccggtaaagcctcttaccgcacgctacaaaaattctttgccggcatggatcaagactccaccatcgccatcgcttcttcgacatctaccgccaccagacgcgaacagcccggttcgtgcatcgtgacccccatcaactgatccgccatttccatggcgatcttgttgtgggtgatatagatgaactgcacggtctgggacatctctttgaccaaccgcgcgtaccgtccaacgttagcgtcatccagcggcgcgtcaacttcgtcgagcatgcagaacggcgccgggttcaacttgaagatggcaaataccagggccaatgcggtcagggctttctcgccgccggacaacaaatggatggtgctgttcttcttgcccggaggccgcgccatgatcgttacccctgtatcgagtagatcttcgcccgtcagttccaagtaagcgctgccaccgccgaaaacttttgggaataacgcctgtaaaccgccattaatctgatcaaaggtatccttgaagcggttacgggtttccttgtcgatcttgcggatcacgttttccagggtgtccagggcttccaccagatcggcgtcctgggcatccagataacgtttacgttcggattgctgctggtactcgtcgatggccgccaggttgatcgcgccgagtcgctggatacgtgcggcaatgcgctccagttcttcttcggcttctttctcgttggcctgggcggtcagggtgttgagcacgccgtgcaggtcgtagccgtcttccagcaattggtcttgcagggtcttgcggcgcacggtcagggcttgccattccatgcgctgctgttcgagctgaccacggatcaactgggattgctgttcggcctgggtccgacgtttttcggcgtcgcgcagttcgcggtcggcgtcttcgagggcgatctgcgcggtcttgagttcttcgtcgacggtcatgcgcttgtcgagcaattcttcgagcttcaggcgcagctcttccagcggcgcctcgccctcctccaggttgaggctcagttgctcgcgcttttcggtcaggcgttcggactgcatctccaggcgctcaagggcttgggcggtggacgcgtgctgggccttgagcgaccccaggcgcacggccaactggtgggcgtggtccttgtgctggcgcgcttcctggcgcacacggtcgaggcgttcgcgcaggctgtcacgctgggccagcaacagttcgcgctgctcggtatcgagggccatgctgtcgagggcttcctgcaactgcaggcgcgcttcgccgatctgttcgtgttccagggcgcgctgctcgcccatttccgcgacttcttcgtcgagacgggtgcggcgcagggtcagttgctcgaccttggctttgctcgcggaaagctgggccttcaattcgccttgctggcgcgcttcgtcctgcaacaggcggcgcaggtgttcgcggccggtctcttgctggcgctgggtggcacgcagggtttgcagttcgatttccaggctttccagggtggcttcgcgctcttcgcgctcggcgatcaggttgacgatttcctggccacgggccaacacgccgctttccgcttcactggcgcgacgcacgcgcaggaagtggcgaccgacccagtagccgtcacggctgatcaggctttcgccagcgcccaactgaacgcgctgggccagggcctgctccaaagagtccactggcttgacctggcccagccacggcgacagatcaatcgccgcttcaactttatccagcagactccctggcacccgcgtaccgtcagcagctgggctgagcaaacgcaggtcgccctgggcaaaaccggccaggtcgaagccgccaaagtcatccaccaacaccgcttgcaggtcggcgcccaagacagtttccaccgccagctcccagccggcctcaactttcaagccttccgccaaacgcgggcgctcggccaggtgctgatcgcgcagccattcggcggtgccggtgcctgggtctaatgcagcttgctgcaacgcctcaagggaggccagccggccatcgagccgctgcaaatcaccctgggcctgttgctgtgcctgggtcgcctgttgcaactgctgacgcaactgctccaggcgttccacttgttgttcttcgctggcttccagctcttccagcgtcatttcgctttcggccagttgctcgctcagctccatgatcgccgcgtcttccgggtcggcggacagcaacgcacgctcttcctgcatacggcgttggcgctcggccagacgctccatactgctttccagctgctggatgcgtgactgctgcacttcggcctggcgccgtggttcggcagacttcaggttgaaggtgtcccactgctcctgccagccatgcatggtggcttcggattcttccagggcggcggcggcctcttcggcggcggcactggtgacttcctgctcaggggtgagcatgtccagctcttcgccgagggtcagcagcaaggtgcggtcgtggcccaggtgggattcggtctccaggcgcgcgcgctcggcttccttgaggtcatcctgcaactggcgcaggcgctgctggccgtgctggatgctctgctcgacgcgggcgatatcgcctcccaccgaatagaagcggccctgcaccagattgaagcgctcggacaggtcatgatgaccgtcacgcaggcgttcgatgctagcgtcggcattgcgctgctcggccaccagggcttcaaagctgatctcctgggtgccgatgatcgcttcgcgctggcccacctggtcattcagcgcctgccagcgcagggccgacagttgtgccttgagctggcgttcctcacccttgtattcctgatacttctcggcggcctgggcctggcggtgcaggcgctccaactggcgctccagctcttcgcgcaagtcggtcaggcgggcgaggttctcgtgggtgcggcgaatgcggttttcggtctcgcggcggcgctccttgtacttggagatgccggcggcttcttcgatgaagttacgcaggtcctcgggcttggcttcaatcagcttggagatcatgccctgctcgatgatcgagtagctgcgcggccccaggcctgtgccgaggaaaatatcggtgatgtcccgacggcgacacttggtgccgttgaggaagtagctgttctggctgtcgcgcgtcactttgcggcggatcgaaatttccgcgtaggccgcgtactcgccgatcagggtgccgtcggagttgtcgaacaccagttcgatgctggcctggctcaccggcttgcggctggtggagccgttgaagatgacgtcggtcatcgactcgccacgcaggttcttggccgagctctcgcccatcacccagcggacggcgtcgatgatgttcgacttgccgcaaccattgggcccgaccaccgccgccatgttactggggaagttcaccgtggtcgggtcgacgaaggatttgaaccccgccagtttgatgcacttgagccgcacgtttaggcgtccgccaacgcagcgatgaccagcgagcaactgcgctggccgtacgccgacagcaccaggcgaatctgcggcaagtcacgggcaagtacggcggcaagcagttgctcgaacaacgccaggtattcgctcatggaggccttgcgttgatccagcgccaggtaataggcgcggttcatcgccggctgcaggttctcgacggtttcctgcaaatacgggttattggcgaaggggtacgcggcgcgcatcacgttgaagctttcttcgacgaaagcgcggatgtcctcgcgctcgtaactggtcaccaggcgctgctggatctgcaggaacggcgccatgtcggcctgcacctgccagccctgggccaccgcattgccgagcaggatgtacagctcgcccatcaaggtgcacaggctctgcaccttgtgcgccgttaactcggtgacgtgggcgccacggcgcggaaggatcgcgatcaggtgacggcgttcgaggatcagcaaggcttcgcgcacggaaccacggctgacattgagcgccagcgtgaccttctgttcctggatccgctccccaggcttgagatcgccgcgaatgatgcgttcggcgaggtggtgagcaatttgctcggcgagactgtccggcgccttgaacgtcatgttttcccttcaaaatcttctatcggtacaagcgcggcagtgtagcgcattggctggctgatggcgctacgcccaccgtggcgaatttggcacggaataagcagcgatgaacagccacaagcccccaaaaacaccggttccagaagactggaccataattgaaagtgttgcgatcgcattttcttgaccttccggtcagaaaatcattgaccgaaaagtcagagatgactagattcggcgcaaagcggttaacaacaataatgagtctgcgaggccttccgtgatccagtttttacttaaccaggaactccgtagcgagcacgccctggaccccaacctgaccgtgctcaactatttacgcgagcatttgggcaaatccggtaccaaggaaggctgcgccagcggcgattgcggggcgtgcaccgtggtggtgggcgagttgcacaccgatgatcagggcgccgagcagattcgttatcgcagcctcaattcgtgcctgacctttgtctcgtcactgcacggcaaacaactgatcagcgtcgaagacctcaagcaccagggccagctgcacagcgtgcaacaggccatggtcgagtgccacggttcgcaatgcggcttttgcacccccggtttcgtgatgtcgttgttcgccctgcaaaagaacagcgaagcccccgacagccagaaagcccatgaagccctggccggcaacctgtgccgctgcaccggctaccgcccaatcctcgccgccgccgaacaggcctgctgcaacaagccccaggaccagttcgacagccgtgaggcgcagaccatcgcccgcctcaaagccatcgcgccgacccagactggagaactcaacagcggcgacaaacgctgcctggtgccgctcaccgtcgccgacctggccgacctctatgacgcctacccgcaagcccggctgttggccggcggcaccgacctggcgctggaagtgacccagttccaccgcaccctgccggtgatgatctacgtcggcaacattgaagaaatgaagcgcatcgacgacttcgacgaccgcctggaaatcggcgccgccaccgccctctccgactgctacaccgcgctgcaccatgcctacccggacttcggcgagttgctgcaccgcttcgcctccctgcagatccgcaaccagggcaccctgggcggcaatatcggcaatgcgtcaccgatcggtgattcgccgccgctgctgatcgccctcggcgcgcagattgtgctgtgcaagggcaatacgcgtcgcaccctggcgctcgaagactacttcatcgattaccgcgtcaccgcccggcaggacagcgagttcatcgagaaaatcatcgtgcccaaaggccacacgctgttccgcgcctacaaggtgtccaagcgcctggacgatgatatttccgccgtctgcgccgcgttcaacctcaagctcgacaacggtgtgatcagcgacgcccgcgtagcattcggcggtatggccgccacacccaaacgcgccaaaaactgtgaagcggtgttggtcggtgccacctggaacagcgccaccgtggaaaaggcctgcgccgccctggcccaggacttcaccccactgtcggacttccgcgcgagcaaggaataccgcctgctcagcgcgcagaacctgctgcgcaaatacttcatcgaactgcaaacgccgcacatcgagactcgggtgaccgcttatgtctaaccatcacgccgtcgttaaaacccaggccgaactcgccgcactgtttgcccaggacctcacttccggtgtgggccgcagcgtcaagcatgacagcgccgccaagcacgtatccggcgaagcgcagtacatcgatgaccgcctggaattccccaaccagttgcacctgtatgcacgcctgtccgaccgcgcccacgcccgcatcatcagcatcgacacggcgccctgctacgcgtttgaaggcgtgcgcattgtcatcacccatgaagacgtgccgggcctgaaagacatcggcccattgatgcccggcgaccccttgctggcgattgatacggtgcagttcgtcggccaagtggtgctggccgttgctgcgcgtgacctggaaaccgcacgcaaggccgccatggcggcggtgatcgaatacgaagacctggagccggtgctggacgtggtcgaggcgtttcgcaaaaagcacttcgtgctcgacagccacacccaccagcgcggcgattcggccggcgcactggccaccgcaaaaaaccgcatccagggtaccctgcacatcggcggccaggaacacttctacctggaaacccagatctcctcggtgatgcccaccgaagacggcggcatgatcgtctactgctccacgcagaaccccaccgaagtgcagaaactggtggccgaagtgctcgacgtgtcgatgaacaagatcgtggtcgacatgcgccgcatgggcggtggtttcggtggcaaggaaacccaggcggccagcccggcgtgcctgtgcgcggtggtggcacgcttgaccggccagccgaccaagatgcgcctgccgcgcgtggaagacatgctgatgaccggcaagcgccaccccttctacatcgaatatgacgtgggctttgacgacaacggccgcctgcacgggatcaacctggaactggcgggcaactgcggctgttcgccggacctgtccaactcgattgtcgaccgtgcgatgttccatgccgacaactcgtattacctgggcgatgcaacggtcaacggccatcgctgcaagactaacaccgcgtccaacacggcctatcgcggcttcggcggcccgcaaggcatggtcgccatcgaagaagtgatggacgccatcgcccgtcacctggccctcgacccactggccgtgcgcaaggccaactactacggcaagaccgaccgcaacgtcacccactactaccagaccgtcgagcacaacatgctcgaagagatgaccgccgaactggaagccagcagccaatacgctgagcgccgcgaagcgatccgcctgtacaacgcccacagcccgatcctgaaaaaaggcctggcgctgaccccggtgaaattcggtatctcgtttaccgcgagtttcctcaaccaggccggtgcgctgatccatatctacaccgacggcagcatccacctgaaccacggcggcaccgaaatgggccagggcttgaacaccaaggtcgcgcaggtggtggccgaggtgttccaggtggaaatcgaccgcgtacagatcaccgccaccaacaccgacaaggtgccgaacacctcgccgaccgccgcctccagcggtgccgacctgaatggcaaggccgcacagaacgccgccgaagccatcaagcagcgcctggtggaattcgccgcacgcaagtacgacgtgagcgaagcggatgtggagttccacaacggccatgtgcgcgtgcgcgagcagatcctgacgtttgaggcgttgatccaacaggcgtatttcgcccaggtctcgctgtcgagcacgggcttctacaagaccccgaaaatcttctacgaccgcagccagtcacggggacggccgttctactactacgcgttcggcgcggcgtgctgcgaagtaatcgtcgacactctgaccggcgaatacaagatgctgcgcaccgacatcctccatgacgtgggcgcgtcgctgaacccggccatcgacatcggccaggtcgaaggcggcttcatccagggcatgggctggctgaccatggaagaactggtgtggaacgccaagggcaagctgatgaccaacggcccggccagttacaagatcccggccgtggccgacatgccactggacctgcgggtgaagctggtggagaaccgcaagaacccggaagacacggtgttccattccaaggccgtgggcgagccgccgttcatgctcgggattgcttcgtggtgcgcgatcaaggatgccgtggcgagcctgggtgactatcgccatcaacccaggatcgatgcaccggccacgccggagcgggtgttgtgggggtgtgagcagatgcggcagttgactgcggcgaaggtggttgaggcggataccgagatggcctcgctctagaccgaggcgctgccatcgggggcacgccccctcccacactttgatctgtgaataccttcaaatgtgggagggggcttgcccccgatagcggcctgacagacaccacaagaggtgactatgaacaactggatcagcgccctcgccgacctgcagaaccaaggcgaaccctgcgtgctggtgaccatcatcgaagagctcggctccacgccgcgcaacgccggttcgaagatggtgatcagtgccacgcagaccttcgacaccatcggtggcgggcacctggaatacaaggcgatgcagatcgcccgcgacatgcttgtgcgcggccagcagaacacccatctggagcgcttcagcctcggcgcgagcctgggccagtgctgcggtggcgtgacggtgttgctgttcgaacccatgggccaggtgcaggcgcaaattgcggtgtttggcgccggccacgttggccgtgcgttggtcccgttgctggccagcctgccgtgccgggtgcgctggatcgattcccgtgatcaggagtttccagcacatatcccccagggcgtgcgtaaaatcgtcagcgaagagccggtcgacgaaattgccgacctgtcggcgggcagttactgcatcgtcatgacccacaatcatgcgctggacctggaactgaccgccgccctgctcaagcgcaatgacttcgcctacttcggcctgatcggttcgaagaccaagcgcgtcaagttcgaacaccgcctgcgcgatcgcggcttcgacgccgcgcagctgcaacgcatgcgctgccccatgggcctcaccgaggtgaagggcaagttaccggtggaaatcgccatctccatcgccggcgaaatcatcgccacctacaacgccaatttcggccagcacaccgccagcgccgaacccattgccaaactgctgccggcttcacgtcgcagccaagccatttgaaatgagatcaccatgcctttgactcgcaaagcctaccgtgccgccctgctgcacagcctcgccgaccccgctgaagtgggcatcgaagcctcctacgagtacttcgaagacggcctgctggtgatcgaaaacggtcaaatcagcgccatcggccgtgccagcgatttgctgccgaccttgcccgccgacatcgacatcacccattaccaggacgcgttgatcaccccgggcctgatcgacactcacatccacctgccgcagaccggcatggtcggcgcctatggcgagcagttgctcgactggctcaacacctacaccttcccgtgcgagagccagttcgccgacaaggcccacgccgaggaagtcgcggatattttcatcaaggaactgctgcgcaacggcaccaccaccgcgctggtgttcggcagcgtgcacccgcagtcagtgaattcattctttgaagcagcagaaaaactcgacctgcgcatgatcgccggcaaggtgatgatggaccgcaacgcgccggactacctgaccgacaccgctgaatccggctaccaggaaagcaaggcgctgatcgaacgctggcacggtaagggccgcctgcactatgcggtcacgccacgctttgcgccgaccagtacgccggagcaactggcactggccgggcaactgctgggcgaatacccggacctgtacatgcagacccacatcagcgagaacaagcaggaagtcgagtgggtgaaggagctgttcccggagcgcagtggctatctggatgtctacgaccactacaagttgctgggcgagcgttcggtgtttgcccatggcgtgcatttgtgtgatgacgagtgtgcacggttggcgcagacgggttcggcggtcgcattttgcccgacctcgaacttcttcctcggcagcggtttgttcaacctgccgatggccgaaaagcacaaattgaatgtgggcctgggcaccgatgtggggggcggcaccagtttctccctgctgcaaaccctgaacgaagcctacaaagtcatgcagttgcagggcgcacggttaagcccgttcaagtcgctgtacctggcgaccctgggcggtgcgcgggcgctgcggctggaagacaagatcggcacgctgcaaccgggcaccgatgcggacttcctggtgttggactacaacgccacgccactgatgagctatcgcctgaagcaggcgaagaacattgccgagacgttgtttgtgctgatgacactgggggatgatcgcacggtgttgcagacgtatgcggccgggcaattggtgcaccagcgctaattccataaacaccccaaaacaaatgtgggagggggcttgcccccgatagcnnnnnnnnnnnnnnnnnnnnnnnnnnnnnnnnnnnngctatcgggggcaagccccctcccacattgttggtcgtatttacaactttatggacgagcgccccggcttcttggtctgcaacaaatgcgaaaacaccgcatgcaggtcatccgacgcgctctcttcatcgaggttgagcttgctgtcgatgtgatccatgtgatgcatcatcaaattcactgccaacgccgcatcccgtgcttcgatcgcatcgatcaactgggtgtgctcgtcataggaacagtgcgagcggttgccgctttcgtactgggcgatgatcaatgaggtctgggacaccaggctgcgctggaagctgatcagcggcgcgttcttcgccgcttcagccagcttgaggtggaactcgccggagaggcggataccggcaccgcggtcaccacgggaaaagctgtcgcgttcgtcgttgaccatctggcgcagttcggccagttgctcagccgtggcgtgttgcaccgccaactcagtgatcgcccgctccaccagacgccgcgccaggaacacctggcgtgcctcctcgacgcttgggctggccactaccgcaccgcgattgggccgcagcagcaccacgccttcatgggccaggcgcgacagcgcgcggcgaatgatggtgcggctgacgccgaagatttcgcccagtgcctcttcgctcaacttggtaccgggtgccaggcgttgttcgaggatcgcctcgaagatatgcgcgtagacgatatcgtcctgggttccgctgcgaccggccttgccggcacgcggttgtttcttgagaggttgcaactgttcgttcatgggcactcgggtttggagaacggcggcgaattaacggtaatacggcaacagcgtgtcgctggcaagtatcacctaaaaacagggcacattgtacacaacccactgcgccaacacactgtacggctgtttgcggcgtcggctgtattgcaatgagtcgctgcgtttgagtttaggcttgaatccgcaacttccctggtaaaaggaacacctgttcatgaccgacgccacccaagcgcctctgcgcccactggccgacacctctgcgtcggccgtcgtcgccggcttcatcgccatgatgaccggctacaccagctccctggtcctgatgttccaggcggggcaagccgccggtttgaccacggcgcagatttcctcatggatctgggcgatttccatcggcatggcggtgtgcagcatcggcctgtccctgcgctatcgcacccccatcacgattgcctggtcgacacccggtgccgcgctgctgatcaccagcctgggcggtgtgagttacggcgaggccatcggcgcgtacatcacctgcgcggtgctggtgacgatctgcggcttgaccggcagctttgaaaaactggtcaagcgcatccccgcgtcactcgcggctgctttgctggcggggattctgttcaagatcggcagcgagatcttcgtcgccgcacagcatcgcaccgggctggtgctggggatgttctttacctacctgatcatcaaacgcctgtcgccacgttatgcggtgctggccgcgctgctgatcggcaccgcgctgtcggggttgatggggctgctggacttcagcggtttccacctggaagtagcaacccccgtgtggaccacgccgcacttctcgctggcggcgaccatcagcatcggcatcccgttgttcgtggtagcgatgacctcgcagaacatgcccggcatcgccgtgctgcgggccgacggctacaacgtgccggcctcgccgctgatcaccgccacggggctggcgtccctggtgctgtctccgttcggctcccacggcatcaacctggccgccatcagcgcagcgatctgcaccgggcctcacgcccatgaagaccgcaacaagcgttataccgctgccgtgtggtgcggggtgttctacgggattgccggggtatttggcgcgaccttggcagcattgttcgcagccttgcccaaggaactggtgctgtcgattgcggccctggcgttgtttggctcgatcatcaatggcctgagcatcgccatgaatgagccgaaggaacgtgaagcggcgctgatcaccttcatggtcacggcgtctggcttgacgctgttttccatcggctcggcgttctgggggattgtggcgggggtgttgacgctgctgatcctgaactggcgtaaggcataaaaaaacggcgaccttcaggtcgccgttttttttcagtatcacttagccgcgttgatcggcttttccggataccacacgtccagcagcgggctgacttcagccttggtcagctcggaacggtttttcagccaggcttcaacggccgcacgttgctcttcggagaccgagccgcgcttctgcaggcaaaccagaccgtagtcatcgccgccgacgtagcccaggccattggcttccatggcttctttgatgaatgcttcgaggaaagcgtcgatagcttcttcactcaggccttcgttgaagtccaggttcagttcgaaacccagctcttgaaattcatcaacgcacagttttttgcgcagacgctgggaacggttagtcgccattggaacaatcctcataagtaataacgggcggcactttagcagtttaaggcggcgattgcccgattctctgggacaggcggcacaacgcctgtgaaaaaaacgccgaatacccgctatggttcagctacaagtggcttaaccttggggcataatgccgacactttcatgaccattgagggatttttcttatttacccctcgcctttttcaccctcctcagcagtagggttttacttcttatgatcaaatcgttgcgttccgtcttgtttgccggttttattctgccactggccttttccgtctccgctgcccccgtcaacaacaccctgccacccaatgttcaacaggcgctggccaaagccaaactgcaaaacactgcgctgtcgttggtgatgatccccctgaacggcccgggcacgcccactgtgttcaacgccgacgtgtcggtgaacccggcctccaccatgaagctggtcaccacttacgcggccctggaaatgctcggccccaaccaccagtggaaaaccgagttctacaccgatggcaccctcagcggtggcgtgttgcacggcaacctgtacctcaagggcggcggcgatcccaagctgaacatggaaaaactctggctgttgatgcgcgacctgcgcgccaacggcgtacagcaagtcactggcgacctggtgctggaccgcagtttcttcaatcagccgcagttgcccgaattcaatgacgacggcaacgacgaaaacaaaccattcctggtcaagccggacgcgctgctggtcaacctcaaggccttgcgcttcgtgacccgcaatgattcaggccgggtactggtgtcggtcgagccgccgattgccagcatccgcatcgacaaccaggtcaaggtctccaacgccaagcagtgcaccggcgacgtacgctacaacccggttaccgccgccgatggcagcgtgacggtaacggtcagcggccagttggccgacggctgcagctcgcagacctatctgtcgctgctggaccacgccacctataccgccggcgccgtccgggcgatctggaaggaactggggggcaccatccagggccgtgacatccaggcgccggtgcccaaggatgccaaggtactggcccgggcattttcgccggacctggcggaaatcatccgcgacatcaacaaatacagtaacaacaccatggcccagcagttgttcctgagcctgggtgcgcagttccgcaatgatgccgatggcgacgatgccaaggctgcacaacgcgtggtgcgccagtggctggcgaagaaaggcatcaccgcaccgcacctggtgatggagaacggctccggcctgtcccgtgccgaacgggtcagcgcccgcgagatggcggccatgctgcaagccgcgtggaaaagcccttacgcggcggaatacatcagctcgatgcccatcgccggcaccgacggcactatgcgcaaacgcctgaagaccaccgccatgcgcggcgaagcccacgtcaagaccggcaccctgaacaccgtgagagccatcgccgggttcagccgcgacaacaacggcaacacctgggccgtggtggcgatcctcaatgatccaaagccatggggtgcttcgtcggtgttagatcaagtgctgctggatttataccgccagccgaaggtcgccgcggcagcaccggtcctgtaggagcgagcttgctcgcgaaaaactcaagaacaccgcgtttatcctggatagacgcgatgggattgacgatcttcgcgagcaatctcgctcctacagaaaagcatcaagcgcgcaggcgctccgtctccacccgatccctgcccgcctgcttggccacatacacggccgagtcggcgcgcagcagcagcccgtcgataccttcatccacccgccaactggccacgccgaagctggcggtgacgatgcctaccggttccatcggcgcactgcgcagcgacgcccacaactccatcgccaggctgtaggcctgagcgccatcggtgtgcgggcacaacaccatgaattcctcgccgcccaggcggcagaacacatcggtacggcgcaggcgctggctgatgcgtttgcacaactcctgcaataccccatcgccgacggcgtgcccatgctggtcgttgatgcgcttgaagtgatcgatatccagcatgatcaccgacaaagcccccgaggtgcggttgagcctgaccatctcggccttgaggcgatcctggaaatagcggcggttatggatcccggtcagggagtcggtgatggagagcgcacgcagctcttcttccacccgtttcagatcggaaatgtccgacacgtagccgtgccacaacgtgccgcctgcgggtaactcttccggagtggcttcgccacgaatccagcgcaggccgcggtgcggcaacagcacccgatactcctcacgccaatgactcaactgcaacgccgacaagcggatcgaagcgcgtacccgctccgcatccagcgggtggatgcgctcgaagacctgcttggcatcctgctgcaatatgctgggctcgatttcatagatgtcgcgcatgccgtcgctggcgtagataaatttccagttgtcgtggggttctaacgtgaactggaagatgccgccgggcacatgggcgctgagtttcttgagcagccgatcccgggccgccaatgcctcgtaggcgcgcttttgttcggtaatgtcgaggtaaatcgccaggtgaccgatccacaaaccatggtcgtccagcaacacggtggccaacatgttcaccgtcagttggctgccatcctcacgtaccagggtccactcgcgggcttcgtgcaggttgtcggggctttccaccagcatcgcctggcttgccgggatgcgtttgcccagggccacactgaggctggcggagcgcgcttcgagttccgacgccaggtgcaggctttccagggtgtgcgtgcccatcacctgctcggccttgaaccccagcatctgctcggcaccggcattgaaggtattgatgacaccgcgcaggtcggtggcaatgatcgcgacctgcgttgcggcattcagcacactgcgcaattggccatgggcgccgcgtaactcctgctcgcgcaggcgcaactgcgccgtgcgctgctccaccagtttcaacgcgcgctggcgttggctgaccagcacatagagcagcgcgctgagcaacaggctgagcaggccgcccatggtcaggatcgtgctcaacgaggagtggttggcctggtcgaacacttggctcgggcgcagtttcagggcatacacatggtcgcccagcgtgaggcggcgcgctccgacaagatcaccgccggccacggcattgccggactcgaacagtacgcgctgttgcacgtcggaggtgtcgatgatctgcatcaccaggttgtcgcgatccggcttgggcaaaccgtcggccaccaactggcgcatgctgatcaccgccatgacatagccgtagggctcattctgggattggtcggaggtaggcaaatgactcaccggcgcgaccaatagaaccccggtggcataggccggttccacgcccaccagttgcatgggctgggacaccgccagcttgccggtcttttgcgcacgctcaagggccgaacgccgcaggggctgggccagcaagtcaaaaccgaggggtgcgcccagcaggctttgggtctggctgtacaagaccggcacgtattcatcgcgctcgggcgcaggggccaactcacccagtgaattcaactcacggataacaaaaggtgtgccgcgctgctcggacgcagttcgctcgaactgactgcgctgttcgcgatacacacggggcgcccaggagtaagcgcgcgcccgcagtagtaagggctgggcaaaaccgtcgaattcttcgcgggacacgtcatcggaattgacgaagaaacgccgcaggctgttcaggcgttgctcctgatcatcgaagcgttcctgcaggcgggtgtagcgctcgttgaccagcatctgaaagcgttggcgcacttgctgctgatagaggtcggcggcggcccaggcaacaacagccgtcaaggcaaacccggccagcaataccaccaatgccaccagccaagccgacgcctgttcactgataaagcctaggattttcgggcgaacggcttgcaacggcataggtaacactcacaacgccagcgtgcggggggtgtcacttggcttggccttaagttatagccatcgaccttgagtttgaccagcgtaaaaaagccgcaaacccggaataatccaggcttacggctcttttaacagcagggatcagcgcgcggtgattttccatgcccggtggatcttcgcattgcgtgcgaagtcggggtcgatggtcttgtcgctgatttcctcgaccgcatagcgctcgctgaggttgtcctccagtgcgaacttgcggaagttgttcgagaagtacaacacgccgcccggcgccaggcgcgccatggccaggtcgagcaactgcacgtggtcgcgctgcacgtcgaagataccttccatgcgcttggagttggagaaggtcggcggatcaatgaagatcaggtcgaactcatcgcggctcgcctccagccaggccatcacgtcaccctgctccaggcggttcttgtcagagaagccgttgagggacaagttgcgacgggcccagtccaggtaggttttggacagatcgacactggtggtgctgcgcgcgccgcccttggccgcgtgcacactggcggtggcggtgtagcaatacagattgaggaagcgcttgccggccgcttctttctggatacgcagacgcatcgggcggtggtcgaggaacaggccggtgtccaggtagtcggtgaggttgaccagcaacttcacgccgccttcgctgacctcagtgaacttgccctgggcgctctgccgctcgtactgcttggtgccgctttgacgctcgcggcgcttgactaccacgcggctcttgtcgatgttcagcgcctggggaatcgcggccagcgcatcgaacatccgcgcggaagctttttccgggtcgatggacttcggcgcggcgtattcctgcacgtggacccaatcgtgatacaggtcgatggccatggagtattccggcatgtcggcatcgtacacgcggtagcaatccacaccttcgcgcttggcccacttgcccagtagcttgaggttcttttgcaagcggttggcaaacatctgcccgccttcactcaggcgcgcctgctcgaccaccggggcaggagcgggtttgatcgggttaccgttcttgttgtactggcgctcttgcggctcggccggggcctggtcgtaggcagcttgctcacgttcggcctggcgctgttccggggtgcgacgctcgccggtgacaaactgatccgggttgaccttgatcagcagcaatttgcacggcaacgcaccgttccagaacgaatactgcttgtggctacggatgcccatgcgcttgcccagatccggcgcgccggtgaacaccgcggcttcccagcccatgcacgcctggcgcagacgctcgccgaggttctggtagaggtacaacaggctggcttcgtcacccaggcgctcgccatacggcgggttgcagatgaccaggcctttctggttctggtccgggcgcggctcgaaggtgccgacttcgccctggtacaccttgatccagtggctcaggcctgcacgctcaatgttgttgcgcgcaggctggatcagccgcggatcggcttcgtagccacggatccacagtggcggcttgttcatgccgatggcggcgcgttcagcggcctcggcatgcagtttcttccacagggccgggacgtgaccgagccaggtggtgaacccccacagctcgcggttcaggttgggggccatgtcagcagcgatcattgcgccttccaccaggaaggtgcccacgccgcacatcgggtcgctcagcgcgccgccttcagcggcgatgcgcggccagccggcacggatcaggatcgcggccgccaggttttccttcaacggtgccgcaccctgctgcaggcgataaccgcgctggtgcaggctgtgcccggacaggtccagggacaggatggcttcgccacggtccaggcgcaggtggatgcgcaggtccgggttgatcttgtcgatggacgggcgatcgccggtcggggtgcgcagcttgtcgacaatcgcatccttgaccttcagcgcgccgaagtgggtgttgtcgatgcccgaaccgtggccgctgaattcaaccgccagggtgccgtcggggaccatgtggtcggcccactcgatatccagcacgccgtggtagaggtcttcggcgtccttcatcgggaagcgcttgagcaccagcagcacgcggttggccaggcgtgaccagaggcacaggcggtaggcggtttccatgtcggccatgccgcgcacggccgaggtgtgctcgcgggcgtccgtaaggccaagcccgacggcttcctcgatcagcaggccttcgaggcccttggggcaggtgaggaagagttcaaaacggtccgacatggggcattccaggcttttcagcaataaatgaacgggcgacgcatcgccggctcggttttcaatcaagcacttttcttgaagagtgctcgcgtggcacgaatgtgccgtcccaccccggctgccgggccttagggcctttagtgacggggcagataaacaattggctgtaacaaaaagaaatattccgacccttcgtcgaataataactgactgcaacgggcggacattctcactaaaggattaaacccatcctctatgcagggtgcatcatagctggctttgcccaataaaaggggcgaaaaaccatcccagcttatggctatagcatcgttatcgttacgtgcttatgacaaaacgatcattgaatccatgtgacctattggttagaactcaacacaggttggcgccgtaacgacgccgacacatcggctcgccacgccggcagcgagcccaccaacggcagaaaaactctgcccggcctcggacgaggccgaaggatatcaagacagtcaacaagtgagggaaacaccctatgagaagacttaagcgtgatccgttggaaagagcatttttacgcggatatcaatatggcgttcatggcaaatcccgtgagctttgcccatttactctaccgtcggtacgccaagcctggatcaacggctggcgagaaggacgcggcgacaactgggacggtatgactggcactgcgggaatccacagactcaacgaacttcacgccgtcggctaatcaagggcaattaattccgacaccacctttggatttgtaacgacttaccatgcacgccccatccgggcggcgggcttcggcccagggggctccttttcaggggccctttttaatgggtcgctttcaggcttttggcaatgctgcgatggcatctaccgactggcgaatcagcgccgggcctttgtagatgaagccggaatacaactgcaccaggcttgcgcccgcggcaatcttctcggccgcatgcttgccttcggtgataccgccgaccgcgatgatcggcaagcgcccggccaactccgcagccagcaccttgacgatatgggtgctcttgtcacgcaccggcgcgcccgacaggccgcccgcttcgtcgccatgggccaggccttcgacacctacgcggctgagggtggtgttggtcgcgatgactgcgtccatccccgagtccaccagggcctgggccaccagcacggtttcctcgtcgctcatgtccggcgcgatcttgatcgccagcggcacgcgcttgccatggcgcacggccaggtcttcctggcgctggcgcaaggcttcgagcagttgcttgagggagtcaccgaattgcaggctgcgcaggcccggggtgttgggcgagctgacgttgaccgtaacatagctggcttgggcgtagaccttgtccaggcagatcaggtaatcgtccacggcgcgctcaaccggcgtatcgaagttcttgccgatattgatgcccaggatgcccttgtatttggcggcctgaacccgcgacagcaagtgatcgacgcccaggttgttgaagcccatgcgattgatgatcgcctcggcttccggcaggcggaagatacgtggcttggggttacccggctgcgggcgcggggtcacggtaccgatttcaacgaaaccgaaacccaactgcgcaaacccatcgatggccgcaccgttcttatccaggccagccgccaggccgaccgggttggggaagtcgagccccatcaccgagacaggcatgtttgccggtgacttgcataccaggccattgagccccaggcggccaccggcaccgatcaggtccagggacagatcgtgggaggtttccggggagagtttgaacaacagctggcgggccagggtatacatgggcgggctagactcggatggcggcgaaaggtgacggcgattatagccggggtcacgggtagcgcgcgaggcgtgaacctcaatcgtcagtggcggtgcgctaccaactgctcgtaatacgcccagattttctgggcatactgcatgcgcaacgcctgacgcgcaggcccggaacccgggcctgcgttgtaggagcctatcgccgtccagttgtagccaaagcgctggatgaactcggcgagaatcgaagcccctacctctaccgacaggcaaggctcattgagcaaccgctcctcggtaatacctcgctcgagcaggcgcggcaaatggctgctgttgatctgcatcaggccgatgtcccgagtaccattacggttcgcactgtttatcgcctgcgcacgaaagcccgactccaccgcagcgatcgcctgcagcagttcgggctcgatgtcgtagcggctggccgcctcctcccagcaataggccagcgcctgattgccggtcatcatcacccccaacaccaagcccttgctccagaacctaaccacgggttaccgctccatggcgggtctggccgcatgccgagcacacatctgccatgcggcccgacacatcgccctcgacctttaccgggcagatgaaccggtaccctcgaccataaatcgtcttgataaaccccttgtcggtggcaaggtacttgcgcagtgagtaaatgcagcgtgtcagcgactcttcggcgacttccccttgcggccaagccagctccagcaagcgatccttggtcatcaacacaccaccggacatcagcaacaatcgcagcaccagcccttccttgggcggcaactgaacatccgcgtcttcaccagtcaggcgaccatcgtcgtgcagggtccaacgcgcaaacaccagggaagtcgtcgtccctccatcatccatgacagccatgattacctcggcatccgactactgacattgaagtcctcatttgcattacgggttcaagtgcccctgtcacgactataaaaacctgcctcagggctcacgctaggacaaagcgcagacatcccgcgttttttggaaccacgctgtaagacgtttctctacccatcagcatcaggtagccatgcgtggtaaacctcgtgcagctcaacccccaaccggtcttccaactgcaccaactcacccaaggccagtaattgcccgttaacccgaacctccacgcaatggattatctccggcatcaacggcaacaccttgccgggcgcaaacgctgccaggcgccggcggctgatcaattgttcctgaagaagaatttccagatgcatcggctaacaccttgttcacggtgagacatcgcgctcaggccgtacaaacgcacgttgaacgcgctcgtattgtgctgctgtcaaaggcggcggccctgcccccccacccggccccagcgcctcgctgcccacggccctggcctgaatcacaaacagacgcacttgatccgggcgagcagccgcccgcccttctgcctctcgttgaaacgcgcccagccacagacgcctgccctggggcacacgcaccacactgttgacccccacctgcgccaccgccgtgtttttttcacgccgacccttctcactcctctggtgcccctcctcaatctcaaggcgcatttcgatctggttagcttcggaaaaacgcggcagtacgctgacctgagtgccatagcgcacaggtttccagtcaattcggtcgtttcccgggggcggtagataaaaggtatggctatcctgaaacaccgccggaacgttctcctgagtgagaatcacgggcagtgtcaccaccttcgcccgtcgacgacgctccaatgcagcgatcctggccatcacgcggttgtcatcccgaggcgcaaagattcgcgtggtcgacgtcttggcgtcttcgtccctgcccaggcccagcttctccagttcagtgcgctccacatccaccagccacagcgacacttcgatcggtcgcttgggtatgtcgagttccgccaccagtttctggatgaaactcacctgggccggcttgcccttgatcagcaggctgttgctgtccgggtaggcgatcacaccaaggctcttgtcggacagcaaccccttgtgctcgctggccagcagggtcttgatcatcgacgccatccccggcacggttaccgggttgtcacgtgtgccgtactgacggtccgccacatcggtgttgagcacttgaaccacaccaaaggcttgcgcgcccacacgcaagtcggctctttgccggtccatcaattgggccaggcgcatcacttggtcgacgtaattcggtgggccggacacatagaaagtgcgcgctccactttcacgcagggggtggcgtgactcatcgaggcccgagcggcgcatgaggccacgcaacttgtcgacggtaatatgccgcaaggtcaccgcagagctctttgcctcgtcggcatcgtagatatgcagcgcttgcccgtcgccgtgccagatcaacccctgttcgagcgcaagcgcttccagcgcctgttgcggcgcatcgaaatccagcgcagtgctgagacgtttgcgcgccaccgcctgactgacaacgatgggcacccccagcggctccgacagcgcagtgaacacggtatacaggctttcatcccgaacctggtgaagctcggccccagccagcgcacttaccagccacagcccggcaaaccacagccaacggtggaaccggaggcggggcatcgttaaaagggattcggcgtgcaccgtgagggttcctgggcagtctggcgttgagaaagcggcaatactgaaagcccgcccggtttcaatcttgatggaaagttgacggccagtcgggcctcaccgcccgtggcatgtgccttgctatgaactctgcatcagagcacgcgccaacggcggagcgcgctacggacaaaggcgtcgttacccgcattggcttacatcgccatctgagggaacgacgctttttttttgaaagaaaaggtaggtgttgatgaacgattcggtcggcaacagcccgatgaacgacccgctggcctgggtcaacggcagtgatgccccggaaaagagcagccttgacctgggtttcatggccctgagcgactgcgcctcgatggtcgtagcggccacccagggcttcgctcaaccctacggcctgaccctgaacctcaagcgccaatcgtcctgggccaacctgcgcgacaaactggtcagcggcgaactggacgccgcccacagcctgtacgggctgatctatgccgtgcacctgggcatcggcggtgtcgcgcccaccgacatggccgtgctgatggggctcaaccagaacggccagagcatcaacctgtcccacggtttgcagcaacaaggggtggtcactcctgaggcactggaccgccacgtgcaccaaagccgaacaaaactgaccttcgcccagacctttcccacaggtactcacgccatgtggctctattactggctggcgagccaaggtattcaccctttgcaggatgtggacagcgtggtggtcccgccgccgcaaatggttgcgcacctgcaagccggacgcatcgacgggttttgtgtcggtgagccctggtgcgccagcgcggtcaagcagaaccaagggtttaccctggcgaccagccaggcgatctggccggatcacccggaaaaagtcctcggctgcacccgtgcgtttgtcgaccagtaccccaataccgcgcgcgtgctggtgatggcgatcctggaggccagccggtttatcgaagaaagcaccgaaaaccgccgctccaccgcgcaattgctcagtggtcgcgagtacctcgacgctccgctcgactgcatcgaaccgcgcctgctgggagcctatgacgatggcctgggcaatcaatggcaggacccccacgccctgcgttttttcgctgatggtgcggtgaacctgccctacttgtccgacggcatgtggttcatgacccagttccggcgttggggcctgttgcgcgaggaccccgactacctcggcgttgcccgccaggtgcagcaactggcgctgtatcgccaggcggcaggtgcgctggggatcccggtgaaaacccaggacatgcgcagcagccaactgatcgacggcaaagtctgggacggttccaaccccaccgagtatgcccgcagcttccgcctgcatgccctggccgatgattccaaccgccaggccttgcgctgacaggagaacctccatgctgcgaatcctgttgatcaatgatactccacgcaaggtcggccgcctcaggacggcgctgatcgaggccggctttgacgtcatcgatgagtcaggcctgaccatcgacctgcccgcacgcgtcgaaacggtgcgcccggacgtgatcctgatcgataccgagtcaccgggccgtgatgtgatggagcaggtggtattggtcagtcgtgaccaaccccggcccatcgtgatgtttaccgacgaacatgacccgaacgtaatgcgccaggcgatcaagtccggcgtcagtgcctacatcgtcgaaggcatccaggcccagcgcctgcagccgatcctcgatgtggccatggcgcgcttcgaaagtgaccaggccttgcgcgcccagctccaggcacgtgaccagcagttggccgagcgtaagcgcatcgagctggccaagggcatgctgatgaaaatgaaggcctgcaacgaagaagaggcctacaccctgatgcgccgccaggccatgagccgccagcaaaagctgatccaggtggcggagcagattatcgccatgagcgagctgctcggctgatctggctcagctcttgctaagtattgcgcacaggtagccaacggcggttgcccctccccgacaaagacgtcgcacacccggtttgccttcgcaaacccggtggcggcgttttttcgttttggccttcttacaagactcccaaccgttgaggtgcgtgatgaaatcaagcttctggaaatccgggcacaccccgaccctgtttgccgcgttcctgtatttcgacctgagcttcatggtctggtacctgctggggccactggcggtgcagattgccgccgacctgcacctgaccacccaacaacgcggcctggtggtggctacaccgatcctggcgggtgcggtgctgcgtttcctgatgggcatgctggcggacaagctgtcgcccaagaccgccgggctgattggccaagtgattgtgatctgtgccctgttcggcgcctggaagctgggcatccacagttacgaacaagcgctgctgctggggctgttcctgggcatggccggtgcatcctttgctgttgcgttgccactggcctcccagtggtatccggcggaacaccaaggcaaagccatggggatcgcgggtgcgggcaactccggcacggtgttcgccgcgttgctggcgcctgtgttggcggccgcctttggctggagcaatgtgttcggcttcgctttgattccgctggtactgacgctgatcgtgtttgcctggctggcgcgcaatgcccctgaacggccaaaagccaaatccatggccgactacttcaaggccctgggcgaccgtgacagctggtggttcatgtttttctacagcgtgaccttcggcggctttatcggcctggcgagtgccctgcccggttacttcaacgaccagtacggcctgagcccggtgaccgccggctactacaccgcggcctgcgtgttcggcggcagcctgatgcgcccactgggcggcgcgctggcggaccgtttcggcgggattcgtacgttgctgggcatgtacagcgtggcggcgatctgcatcgcggcggtgggtttcaacctgccaagctcttatgcggcgctggccctgttcgtctgcaccatgcttggcctgggcgccggtaacggcgcggtgttccaactggtgccgcagcgtttccgccgtgagatcggcgtgatgaccggcctgatcggcatggccggcggcattggcggttttgccctggcggccggtatgggggcgatcaagcaaagcaccggcagctatcagatggcgctgtggctgttcgccagcctgggcgtattggcctggttcggcctgcatggcgtgaaacgtcgctggagaaccacctggggctcggccgccgtgacggcagcgcgggtctgatgagcctgcaactgagcatcgcccaggccaatgccatcggccctcggacggaaaaccaggacgcgctgcgggtggtgacccccgtggccgaactggcagcgagcaaaggctacttgtgcgccatcgccgatggtgtgagccagtgcgccgacggcggcctggccgcccgctcgaccttgcaggcgctggccctggattactacgccacgccgcagacctggagcgtggcccaggctctggagcgtttgctgctggcccagaatcgctggctgcaggccaatggcggtggccagccgttgctgaccaccctgagtgccctggtgtttcgcggccagcgcttcaccctggcgcatgtcggcgattgccgggcgtatcgctggctggatggggaactgcaacgcatcagtgaggatcacgtgtgggagcagccgggcatgcagcatgtactcaagcgtgccctcggcctggatcaacacctggtggtagattttctcgacggccagttgcgcgaaggcgaatgtttcctcctgctcagtgacggtgtgtgggcaaccctgggcgatcacagcatccgttcgattctgcgcgagcaaaccgacctggagctggcagtcaacaccctggtgaacgccgcgcacctggcgggcagccaggacaatgccagtgccctgctcgtccgcgtcgacgcccttggcgcagccaccctcggcgatgccctggtgcagttgcagcagtggccgctgccacccccgctgaaagccgggcaacactttgaaggctggcaggtgcaaagcgtattggcgcaaagccggcagtcattgttgtaccgggtgtgggatgcccagcagcaaccctggctgctgaaaaccctgccgctgagccgcgatgatgacggcgatgccggccaggccttgctcgcggaagaatggtttctacggcgagtcgccggccgggcgtttcctgaagtccatgccgccagcgggcgccagcatctgtactacgtgatgcgggaataccccggccagaccctggccgaactgttccagcagcacggaccattacccctggcgcaatggcagtcgatcgccgagcgcttgctgcgggcggtgggcatgttgcaccggcgacagatcttgcaccgcgatatcaagccggaaaacctgctgctgggggatgatggcgaactgcgtgtgctggatttcggcctggcgtactgcccaggcctgtcggaagaccgcgctcatgcgctgccgggcacgccaagctttatcgcgcccgaggcgttccatggcgaccgccctacggcccagcaggatttatatagtgtcggtgtcagcctctattacctgctgaccgggcactacccctacggtgaaatcgaagccttccaacggcccaggttcaaccagcccgtcagcgccagtcgctaccgccccgatctgccggattggctgcccctgagcctggaacgcgcagtggcggcccaaccggcgcatcgttacgaaactgccgaagaatggttgcgagtgctggaacaggcggaccgacaggaactgagcatccgccccaagcccttgctggagcgtgaacccttgaaggtctggcgcactctggcgctgctttcgttgttgatcaacctggtgctgttgtacgcactctttcaccgctgacgtcatccctggacgaggaacaatttatgaacgcaaaagtctggctggtgggcgcaggccccggtgacccggagctgttgaccctcaaggcggtacgcgccttgcgtgaggccgatgtggtgctgatcgatgacctggccaaccaggcagtactggaacactgcgtcggagcacgggtgatcaccgtgggcaaacgcggtggctgtcgctcgaccccgcaggactttatccatcgcctgatgctgcgctatgcacgccagggcaaatgcgtggtgcggctcaagggcggcgacccgtgtattttcgggcgtggcggtgaggaagccatgtggctgcgtgaaaggggcgtggaggtagagttggtcaacgggatcacggcggggctggcgggcgcgacaaattgtgcggttccgctgacgctgcgcggggtgagtcgtggcgtgaccctggtgacggcgcatacccaggacgacagccgcctgaattggcgagcactggccgagggcgggacaacgctggtggtgtacatgggcgtggcgaagctggaggagattcgccagcaactgctggacggcgggatggcggcggatatgccggtggcgatgatcgaaaacgcatcgctgcctcagcaacgggaatgccgcagtgaactgtcacgaatgtatgcagatgcgcaggcatttgccttgaaaagcccggccatcctggtaattggccatgtcgcagccccaggacaagtcgcttgcctcgctcaagccgccagcgcctgagacaaattacaggcgaaaaaaaagcccggcctgagccgggcttttttctaccactcagtaattactgagcttgagcttcaaccgacgcttctacgcgacggttaacagcacgaccagcttcagttgcgttgtcagcaactgggcgggattcgccgtaacctactgcggtgatacggctaggagcaacgccgtctttaaccaggacttgcttaacagcgtcagcacgacgctgggacagcttctggttgtaagcgtctggacctacggagtcagtgtgaccagcaacttctacgttggtagctgggtactgagccatgaagtcggccaggtttttcacgtcgccgtagctgttaggcttaacaaccgacttgtcgaagtcgaacttaacgtccagctcaacacgtacaacctgagcaactggagcttctggctctggagttggctctggagctggtgctggggtaggagctggagcagctgcgccagcgttaccgccgaagttcacgcccaggccgaccagtgcggagtagtcccacttgccgttgtccagaccgtagtcagcttcaacaccggcacgagcgtacaggttgttggtgaagtagtacttcacgccagtaccaacggtagcgaaggtagtctggtcgcgaccgctgtggccgtcagcctgaacgttggtacggctctggtggccgaaaccgccttctacgtatggacgcaggctgtctacgccagcttgaccgaagtgatactgggcaaccaggctgccggtatcgcctttgatcttctggttaccagtaccgtcgttcgaacgggtgtggttggtcttgtcgtaggacaggttcaaggacaggtcgtcggtcaggaagtaaccgatgcgagcgccaggattgaagccgtcttcgatgtgcttgacgctatcgttgtactgcttcttgtagaacagctcgccttcaactgcgccttggccttgtgccagaacgccgaaagaagtagcggcaataagagaaccaatggccaagcccaaggtgtttttcagtttcatccgttaaatccccatctggtgattgtaaagcagtcccacaaaccgggggacaactcggcgacaagtctaacagaacttgcctacacgtaagagatatttgccacgcactaagtttcagtctcgcccgcaaatttctcacgtaatttatcaagagcacgtttgtaacgcatttttgtagcactcaaacccatgtgcatgatgtcagcgatttcctggaattccagctctgcgacaaatcgtagcaccagaatttcccggtcaatcgggttcacatacaccaaccagcggtcaagtccgcccttctcctcgggtgccggcgccttttcttcagacgcctcctcaagggggtcaagactcaacgcgtccatcaagcgacgcttgcgccgttccttccgatactgcgtgatgcactcgttgtacgtgatgctgtacagccatgtcttgaacttcgatttgccctcgaagttcttcagcccgtacagcaccttgagcatcacttcctgacagacatcgtccgcatctctatcgttccctaaataccttgaacaaacgttgaacagagtgcgttgatatctgcgcatcaattcttcgtacgcgcgagttacgtgaaacagctccgtgtgcgagcgcgcgaccaactcctcatcagagagctcacgggggtcatagcgcgtggacagcgtttgggctttattcaaaacaagtcgtgccgacagtcaggtcaatgtccgccacagcccgatcagccgggttcgcggcggcgtacattagcagggtttgccgggttagcggctactgacctgctgttccaggagaatccgattggacaacgacaccagatcgccgtcatcggtcagcaccgtcgtcttgactgtgccgatctcctcgatttgcccttcgacctcgcccacacgcacctgttgccctacctgatacagctcacgcacatagattcccgcaagaatctggccggcaatttcccggcttcccaagcccatggccagcgcaacggccagaccaacggtaatcaaaacgatcacaatcacatggttgagcaggtcagtcttgacctccaactggctgatcgcgaccgaaatactgatgatgatcaccaggccctgggcaattcgccccaggccggcagcatagtccaaccccacgccttcggcggcgccgcgcaccagcccattggccagttgcgccagcaaaacgcctaccagcagcaccagcgcgccgccgaaaaccttcggcaaatacagcgccagcatgtcgagcgtagctgaaactcgctcaagtccaagggattgagccgcagaaaccaggaaaatcagcaaaacaaaccaataaacgatcttgccgatcaatgtcgagatcggcacttgcagcccggcacgtcccaacagcttggtcaggccggtgcccgccatcaggcggtcgaggcccagtttcgcgagcagtttggacagcagggtgtcgagcagcttggccacgacaaagcccagcagcaccagcaccaaggcaccaaacaggttgggaatgaaattcgccaccttggtccacaatgcggtcatcgcggtgaccaggctctgggtccagagatcaagttccatattcaatcagccttatcagcagtgcgagcaagaggtttacgacgggaaaccggtgagacatgggccgaaccgttgttcagggccatcatcaacgccggcacccagcgcccgagcagaccgaacagatcacccgcgcctacctgacggttggcggttttcagcacgcggcccaggcaggcatcgtcgtcccggttggacggcgaagcattgagcatgtcacgcaaagactgttcgaacggatcgtgcataaggacctctcgcaagtgatttaaaagacgagggttaaattcttggggtcacataggacccttcctacgttcagctcatattcaggtcaaacccagcgtaatcgtcgaaaaagccaccattgtccaagcgccaccgagaccatcaacaggcacgcaatcatgaatccataggggctggcagagaacggaatcccgcccacattgatacccagcaagccggtgagaaaactcatcggcaggaagatcccggtgatgatcccgaagcggtacatggtgcggttcatacgcacgctcaaacgccggtcttcggcctccagcacaagccccacgcgctctcgggtcaattcgagctcttccagataacgggtgaggctgttgttcaattcgttccaatagtcggcatcgtcgtcacagaaccacggcaatttgatgcgcgtgagctgggcaaaaatatcccgctgcggcgccaggaatcgcttgagcccggccgcccgtcgacggatctgcaaaacgctgccatgttccggggtataccgttcgtcggtatcgagtttttcttcctctatgtcgacgatttcggacaggtcggagaccagatcctgcactttattggtgaggtactgagccatataaaggatgagttcagaggcggtcttcggccccttgccgtccgccaattgcaccagcagttcgtcggtggcgcgcaacgggcgcaaccgcagggaaatcacccggctggccgcagcaaagatgcgcaccgagaccatgtcctccggttcagcaccggggttgaggttgacccctcgcaagaacagcagcaattgcgagtccggcagcggcaacaggcgcgggcgggtgttctcctccagcaacaggtcacaggcgaactcgctcaggccactggatttgcgcagccaggtctgggtttgcggatgactgcgatcccaatgcagccacaggctttcctggggctgcagttgcaagtcgtcgagctctgtccgtgcaatcgaacgcgcaccgcctttaccgtccagcaccagggcatgcaccaggccccactgcgcgttttcttcctcgaacatcctcaccccgtcggttattgcagtttattcaggcattttcagcgggctgggcgacacgatcacgccgttgttgtcggcatagatgtactcgcccggacggaacgtcaccccggcaaaggtgaccaccacgttcaagtcgccgatgccacgcttgtcggtcttcatcgggtggctggccagggcctgcacgcccaggtcggtctgggcaatgacgtcgacatcgcggatgcagccgtagatcaccagcccttcccagccgtttctcgcggccttctcggcgatcatgtcacccagcagcgcacggcgcagggaaccgccaccgtcaaccaccagcaccttgccggcgccaggctggtctgcctgttccttgaccagagagttatcttcgaagcatttgatggtgacaatctcgccaccgaaggaatctcggccgccgaagttgctgaacatcggctcaagcacctgcaccagctccgggtacgcgtcgcacaggtcgggggtcacgtaatggttcattgaacaattcctttccgtcaaagaagcgtctttcaaaagaagcgccagcccaagcaggtgcgaaacatcccatccacttcgccgcaacgcaatagccactgcgcgactgaatatgaccagaagcgtttaacgcgtcatatcttagccgcaaccacacacgagtgaaacgcccttggcagagccctgccctcaacccgtggccagcacctcgggctgcacgccgaacaagggtgtgagcgggtcgttcagccattgcaccaccagcggccacacttcggcctgggcagctttgctgacgagcatttcaacgtgcccgaaatcttcggtaaacccttgctggcggcccaggcacaggtattgacggtgctcggagccgacctgctcgaacagcttgcgacacgcccagtcagggtcctgatggtcgccggcggcactgaccgccaacaacggcacatccacgtctgccaggcctttccaccagtcgttcttgccttcgccaaagcggccaaacaggccgttccagcgcatggcttcgatcatcacacctgccggctcgtcctccgggccacgcttgaggcgcgagccagacacttcgccgaagcgtttcaagagcaagcgccccgtccactccaccggtggcagtttcaacggccagtgggtgcggctgacctggcagccaaacaacgctacagaagccacggctggcgcgccaaggtgcttcccgccaagcgctgcagccaggctggtgccgcccagggaatggccgatccagtggggaacctgcccgctttgctcgcgcacaaacgcgccaatggccggcaagtcgtagcgcgcatagtcagcgacgcggttgcgtgcgtagtcatgattgcgcttggacaaaccatgaccacgcatttccgggatccacacatcaaacccctgacgggccaggtaagcccccaggccgatgcctttgggcgaataccagaagcgccgattggaaaaactgccatgcaataaaataaccgcaatgccccggttttccgggacatcggccaggcccagacgggtaaccgccagctcgacggtgccgtcggggctgttaccgggtttgaggcggtaaacatcttcactcaggtcgccacgacgttcagcgctgatcagggcgacgggaaacagtttgctgctgctttgcataatgctcttgcacaaaaaagggcggcgtccggaaggagttccgccctgcacagataagaatgccggtcacccttatcgggtgaccggcacttttgacatgacgatcttaggcggacgcttggccttccgccaggaagaaccaggtttccagcacggaatcggggttcaacgagacactttcgatgccctgttccatcagccatttggccaggtcaggatggtcggaagggccttggccgcagatgccgatgtacttgccggccttgttacaggcctggatggcattggccagcagcttcttgaccgcagggtttcgctcgtcgaacaggtgggcgatgatcccggaatcgcggtccaggcccagggtcagctgggtcaggtcgttggagccgatggagaaaccgtcgaagaactccaggaactcttcggccaggatggcgttggacggcaattcgcacatcatgatcacgcgcaggccgttttcgccacgggacaggccgttttccgccagcaagtccaccacctggctcgcttcgcccagggtgcgcacgaacggcaccatgatctcgacgttggtcaggcccatctcgttgcgcacgcgtttgagggcgcggcattcgagttcgaagcaatcacggaacgcttcgctgatgtaacgcgaggcgccacggaagcccaacatcgggttttcttcttccggctcgtagagcttgccaccgatcaggttggcgtattcgttggacttgaagtccgacagacgcacgatgacctttttcgggtagaacgccgccgccagggtgctgatgccttccactagcttctcgacatagaagcccaccgggtcgttgtagccggcgatgcgcttgtcgacgctttccttgatgtccagcggcaggccgtcatagttcaacagggccttggggtgcacgccgatcatgcggttgatgatgaactccagccgggccaggcccacaccggcattcggcaattgcgcgaagtcgaaggcacggtcagggttgccgacgttcatcatgatcttgaacggcaggtccggcatggcgtcgatggagttctgcttgatgtcgaagcccagttcaccttcgaagatgaaaccggtgtcgccttcggcgcaggacacggtcacgccctggccgtccttgagcagttgggtggcgttgccgcaaccgactaccgcagggatccccagttcacgggcgatgatcgccgcgtggcaggtacgcccgccacggttggtgacgatggcgctggcgcgtttcatcaccggttcccagtccgggtcggtcatgtcggagaccagtacgtcacctggctggaccttgtccatctcggacacgtccttgatgatccgcaccttgccggcgccgatgcgctggccgatggcacggccttccaccagcacggtgccggtttctttgagcaggtagcgctccatgacattggccgacgtgcggcttttcacggtttccggacgggcttgcacgatgtacaacttgccgtcgtcaccgtccttggcccactcgatgtccatcgggcacttgtagtgcttttcgatgatcatcgcttgcttggccaactcgctgacttcagcgtcggtcaggcagaaacgcgcgcgttcggccttgtcgacttcaacggttttcaccgaacgaccggccttggcctcgtcgccgtagatcatcttgatagccttgctgcccaggttacggcgcaggatggccgggcggcccgcttcaagggtgcccttgtgtacgtagaattcgtcgggattgaccgcgccctgtacgacggtttcacccaggccgtaggcgccggtgatgaacaccacgtcacggaagcccgattcggtatcgagggtgaacatcacgccggcagtgccggtttccgaacgcaccatgcgctgcacaccggcagacaaggccaccagcttgtggtcgaaaccctggtgcacacggtaggaaatcgcgcgatcgttgaacagcgaggcgaacacttccttggctgcgcggatgacgttttccacgccgcgaatattcaggaaggtctcttgctggccggcgaaggaggcgtccggcaggtcttcggcggtggccgaggagcgcacggcgacggccatgtccgggttgccggccgacagggtggcgaaggcggtacggatctcttcgttgagcttctcggggaactcggcttccatgatccattggcggatctgggcgccggtcttggccagggcattgacgtcatcgacgtccagggcgtccagcgcggcgtggatctgagcgttgaggccgctcagttcgaggaaatcgcggtaagcctgggccgtggtggcgaaaccaccgggcaccgacacacctgcgcctgcaagattactgatcatctcgccgagggatgcgttcttgccccccacgtgctctacatcatggacgccgagcttatcgagggaaactacgtactctaccaaggtgatctctccactttctgtgttggaaaagctcaggacgccggctgctcagtaggagcattcgccagcgcttgtggcctggacctggaaaataagtgagaatgcggcccactgcgggacggcaaaatcgcgcctatcatatccaagattcgccatcagcttaaggcccagggctcaaatgaaacgatctgctttctttatctccgacggcaccggcatcacagccgaaacactgggtcaaagcctgctcgcgcagttcgaaaacattaccttcgccaaattcacgcggccgtacatcgacagcgtggataaagcgcgggccatggtacaacaaatcaatctggcggctgaaaaagacgggttccgcccgatcattttcgacaccatcgtcaatcaagacatccgtgagattctcgcaacgtcgaatggtttcatgatcgatattttctcgaccttcctggcgccattggagcaggagttgagtgaacactcctcctattcggtcggaaagtcccattccattgggcacaactccaactatatggagcgtatcgaggcggtgaacttcgccctcgacaacgacgacggcgcccgtacgcactactatgacaaggccgacctgatcctggtcggcgtgtcgcgctgcggcaaaacgcccacctgcctgtacatggccatgcagttcgggattcgcgcggccaattacccgctgaccgaagacgacatggagcacctgacgctgccggcggccctgcgcgcgcattcgcacaagctgttcgggctgaccatcgatccggaccgcctcaccgcaatccgcaatgagcgcaagcccaacagtcgctattcgagctatgcccagtgtgagtttgaagtgcgcgaagtagaaaatctgttccgccgggagaatattgcgcacatcaattccacgcatttctcggtggaagagatttccgcgaagattctggtggagaaaggcgtggagcgcaggttcaagtaagggtggcgcctggactggcctcttcgcgggcaagcccgctcccacagttgaccgagttccagctctggaatgcggtcaaaatgtgggagctggcttgcctgcgaagaacgataacgcggtgaacctgcctacagctgaaaccttcctcccccctgccccagcgccgtggccagcgcatcaaaccccgcccgcaacagctgatcatcccccgaggtgttgcagatactcgcccggatgaactgcggcaccgccgtctgccccacggcaaacgcctcggcggtggcgatcaggtaattattctgcttgagctcggcctcgatctccgacgcccgccatggctccggcacttctatccagaagtgcgggctgttgagatgggtgcggtattccaggcccgccagcaggtcgcggaccagcgccttgcggcggctgatctcgttgatctgctggcgcagcaggtattccgccgtgccgttctcgatccactgggtcgccagctcgagggtgacgggcgtggccatccagcaggtcgaacgcagggccgccgaaatacggctgaccagtgcgggcggcgcatgcacatagcccacacgcagcccggcggacaccgccttgctcaggctgctgatcaaaatcgtacgctcaggggcgaaatggctgaggggcggcggccgatcctccaccagtacaccgtgggcttcgtcctcaagaatcagcagattgtgttcgcgacagactttgaccaacgcttcgcgacgcgccaccgagagcacagcggtggtggggttctggatggtgggcgtgcagtacagcgctgaaatccggtgattacgacagacttcgtcaagcgcgctcggcagcacgccttcttcgtccatctccagaccgatcagccggatacccagcatgcgcgcggcggtgatcaggccgggataagtcagctgttcagtgaccaccgtatcgccagcccgcaacagtgccatcatcgagcagagcaagccgtgctggccgccgttgacgcagatgacctgctcggggatcggatgaaaatcgcgctgcaccagccattgcgcaccggcttcacggtagcgcggcaagccggcgtctggcgtgtaggcactgatgtcctggaggaacttggcgttggtcgacagggtttggaagctctgggccaggaacaccgtctcctgccccgggatgtgcatattccggctcatgtcgaagtattggcgcggttcttcgctgaagttgcgaaagccttcatcgcgctggcgctccatcccacgcttgcgcacgaaggtaccgtcccccacccgcgccaccaccaggcccaggcgttccagttcgccgtaggcacggctgatggtgccgatcgtgacgccaagattgtcggaaagtacccgatggggcggcagttttcttcctggctcaatcaagccttcaaggatgccccgttccatgacatcggacagtcgcttgtacttcacgccctgaccgttggacaacccctcacgcataattgacaccatgtcaatatttgttttgacagccatctttcgccctaatagtgtgcttttacgggttcaatcgccgaattttacaactcattacaagctcaatatagagttcaattccggctcagggaagcaataaacgatgccaatgtccgccgttctcgaaaacaccgccaagaccaaaacccaaaaacagtggctggccgggctgatcaccagtgtgatgttcctgatcgtgtgcctgagttggggcaccacctggctgggtatcaagattgccgtggagagcgtgccgccgctgacctccgccggcctgcgcttcctcatcgccttcccgctgttcctgtgttttgccatggtgcgccgcgaaccgatcctgtttccccgcgagagtcgctggttcttcgtgttcgtgaccctgtcctacttcagcgtgccctactacctgctcaactacggcgagatgcatgtctcgtccggcctcaccgcgctgctgttcagttgcatgccggtgttcatcctgattttctccgcgctgttcctgcgcgaacgcatctacttttcccaggtggtcggtatcggtatcggcttcggcagcctctacatgatcatcaagagccagggcctgcacctggaccacgccgagttcttcggggtactggcgattctgaccgccgcgatcatgcatgccttgtgctacgtcatcaccaagcagaaaggcagcgccatcagcgtaatcacctacaacaccctgcccatcggtattgccgggctgatgctgttcgtcgccgggctgtggtttgaagcgccgaccttcgaagccatcaccctacggtcgtggggtgcgctgttctacctggggctggtggcctcggtgggtgggttcatcgtgtatttcatgctgctcaagcgcttgagcccgatcatcctgtcgttcgtgtttatcatcttcccggtgttcgcggtgatcatcggcgcctggtacgaaggcgtgtcgatttcccgcgacctgatgctctactcggccatcctgctggccggctttgcgatcaccaagttgccggttgaaaaactcttggccaagaaaaattgaccctcctaccaccacgcgagagaaacatggacgtcctccgccccgaagccctggaacagatctacgcccacgccagccgcagctaccccgaggagtgctgtggttttgtcttcgccgacggcagcgtgtacctgggcagcaatatccagaacgagctgcaccgcaagaaccccgagatgtacccgcgcagcgccgccaacggctacacattctcggtggccgacaccctgctgctgagcaaggcgtttcgcagcgacaacccggtggtggtgatctatcactcccacccggatgtcggcgcctatttcagcgacgaagacgaggacaaggcgctgttcatgggtgaaccgatctaccccgtcagctacctggtggtcgacgttcgccagggccaggccctcggttccaagctgtttgcctgggatggcaagcatttcgcccttcaacctttcaacgacctgcacacggagttgtccatgaacgctgtctctttccccgacattctggttcgcgtggccaagctgccggaatcgaccctcgagggcgccggaacgacattgcgcgaagtcattgaaaacctctgcagcagccacccgcagttacgtccccacctgttccacgagaagaacaaccagctcaaggaacacttcctgtttaccgccgaggaagagttagtgggcgccgacgacccactaccggaaaaagcccggatcgaagtgctgctcgccacgtcgggcggcatggatgtcgacgcactgagcaatgaagaagtccagcgctacgtgcgccacatcaccctgcccggcgtcggccgcgaaggccagttgaacctcaagaaagccaaggtgctgatcatcggcaccggtggcctgggctcaccgatcagcctgtacctggcagcagccggcgtcggcaccctggggctggtggacttcgatgtggtggaaagcagcaacctgcaacgccagatcgtccacggcaacagcacgctgggcatgcccaaggtcgagtccgccaagcaacgtctgcaagaactcaaccgtcatatccagatcaatgcccacgacaccgccctgaatgccgataacgccctggaactggtgggcgcatacgacctggtgatcgacggcaccgacaatttcgacacccgctacctggtcaacgacgcctgcgtgcagctgggcaagccgttggtatacggcgccatctaccgcttcgacgggcagatcagcgtgctcaactataaaggtgggccctgctaccgctgcctgttccccagcgcgccgcccgccgaactggcgcccaattgcagcgccggtggcgtgatcggcgtgttgcccggtgtggtcgggatgatccaggccaccgaggccatcaagctgttgatcggcattggcgaaccgctgtctggccgcttgatgcgcttcgatgcgctggcgatgaagttcagcgagatccgcttcaagcgccgtgccgactgcccgtgctgctccgaactgcgccataacgaaagcgtggcaccggctgtctgtgcagacgccatgcccagccgaccgtccctggccgaggagcgctacataaagccccgtgtactcaagcaattgctcgaacacccgcgcagcgtcgatgtgttgctggacgtgcgtgatgccagcgaactggaggtatgcaaattgccaggtgtggtgcatatccccctggccgaactggacgatcagctcgaccgcctcagccgggacaacacccactacctgatctgctacgccggcacccgcgccgagcaagccgccagtaccttgctggcggcgggtttcgccaataccaaagtcctgcagggcggcatgaagcattgggttcgcgacgtcgaacccgacatgcccttgtattgagccgaggactgaatgatgttgcacaactcgattctcgaggtgatcggccaaacgccgatcgtgcgcctggcgcagttctccgaagacctcggcatcgaggtctacgccaagctcgaatccctcaacccgggcggcagccacaaggcgcgcatcgccctgggcatgatcctcgacgccgaacgccggggcgtgctgatccgtgactccgggcaaaccatcatcgagcccagcggcggcaataccggtatcggcctggtcatggccggcaatgtgctgggctacaaggtcgtgctggtgatccccgacaactacagccccgaaaaacagaagctgctgcgcctgtacggggccaaggtggtgctgtcggacagccgcctgggcaacaactcccacggcgaaaagtgcatggaattgcagctggaaaaccccagctacgtgatgctcaaccagcaacgcaacggcgccaacccacagacccatcgcgacaccaccgcaccggaaatcctgcgtgcgttcggcgagcgtcgcgccgactactttgtcagcggaatcggcaccggtgggcatatcaccgggattggcgaaaccttgaaagccgcctggccggggctgcgcgtcatgggggtggagccggaagaatgcgacctgctgaaaaaccagcatgcgccgcaccatatccagggcctgtcgatcggcctgatcccgagcatcctcaacctggacgtgatcgacggcatgctcaaggtctcgcgccaggactgcatcgacatgatgaaacgcatcatgcgcacggatgccatcagcctgggcttgtcttcggctgccaacatggtggccgtcgcccaactcgccccggaactgccgcccgaaacggtggtgctgaccatggtctacgacaatgccgacagctacctgcccagtttcgaataaacggtcttccaaccaatcagacgacgggggtgcctcaatgggtggctttatcgacatgcaacagttgcacgatgagttgctgactcacctcatcaagacgctcacgccggcacagatgaaacagctggagccgcatctggcgccgctggtacagaatgccgcccaggcggtggccgaggatttgatcgcctacgcctaccgcgacccggcatcccgtgggcgcggtgagctgatcctggagtcctacgcgtcgttcaaggcggtgctgtattaccggctggcgcacctggtgtggcatttccccgaccgcaccaacggcgtcttctcgcgtatcgccctcaagctgagcaaccagggcaaggtgctttccggcgccgagatccacccggcggcgcgcattggtcggcgctttgtactggatcacggctacggcaccgtgatcggcgaaacgtgtgagatcggcaacgactgctacatcctctgcggcgtgaccctgggcgcccgtggcatcgccaacaaccccgacggcaagcgccacccacgcctgggcaataacgtcgaggttggttccggcgcccgcgtgctcggctatgtactgatcggcgacaacgtgtttatcagtccctcctgtgtgatcacccaggatgtgcccgccggcaccaaagtgaaggtggtgaaccagatccaactgcaaaaaaacgacgagtcggaccacagcaattacctcggcgccttcgccctggatgagcgtctgcacgtggtcggcgagatcaatgcgagccacaaggtcacggtgctggacgccgacttccatcccttgcccgggctgatgctggagcccacggtgaaggagcgtcaccacctgcaatttcgcctgcaccgcatcgagtcgggcaaccccctgccacgcctgccgctgaacctgaaggtctgcggcccggaatttgaaatcaccctgctttccccgcctggcttgagtgcgatggtgcgttccctgttgcaagccagtccattgatcgttggaggttgaacatgtccgtgcacaccatggaaaccctggcgctgttcgacagcgcgccctaccagaacgccttcagcgcccgggtgattgccgtcagcgaacacggcgtcgccctggaacacacgttgttctaccccaccgggggcgggcagccaggcgacacggggcacctcaccctggcggacggtacgcgggtcgaagtgaccggcacagtgcgcgacccggtgcagcgctcgatcatctggcaccaggtggaacactgccccgagcaattgaccgccggagtgcaggtggacgccggcctcgactgggaccggcgctaccagcacatgaagatgcacacctgcctgcacctgttgtgctcgatcatcgacgcgccggtcaccggatgcagcatcagcgcagacaaaggccgcctggatttcgacctgccggaaatgaccctcgacaaagacagcatcacccgcgacctcaatgcgctgatcgaacaggcccacccggtgaaaaccctgtcgatgccggccaccgagtacgccaccctgctgcagatcacccgcacccaggcggtggcaccgccggtgattcagggtgcggtgcgggtgattgaaatcgccggcatcgatatccaaccgtgcggcggcacccatgtgctcaacaccgaagaaatcagccgggtgttctgcgagaagatcgagaagaagagcaaacacaaccgcagagtcatactgcgattcgagtgaacacggtgaactgtgggagccccccctcccacattcattgggtttccacagataaatacagggtgtctgctagatcacgaaaagatcaacaaaccggtttaccggcgttgcctcaagccgcgcctgatctttgcacaacgcaaaaatctcggcgctgcgctgcgcggtaaaccgtgtgaccaggttggccttgaacttgtcttccaataacggaatgccatccacccggcgacggcgatggccgatcgggtactccaccgccacctgctcggtgctgctcccatccttgaagaacacctgcaccgcgttggcgatggaacgcttgtcagcctccaggtattcgcggctgtagcgtgggtcttcgacgatgaccattttgtcccgcagcgcgtcgatgatcggatgggcggcgtggaattcgtcttcgtactgctccgccaccagattgccgaacgccaacggcacggcggtcatgtattgcaggcaatggtcacggtccgcggcgttggccagttggccgaccttggaaatgatgcgaatcgccgactcatgggtggtgatcacgatacgttcgatttcctgcaggcgatccttgaccaatggatgcaaggtcaccgccgcttcgcaggctgtttgcgcgtggaactcggcggggaagctgatcttgaacagcacgttttccatcacataggtgccgtagggctgggacaggctgaacccgcgcttgtcctgcggcttgagcgccaggtccttgttggtgtggctgaacaatacgtcgtagaacccccactgcggtgcgcttaatacaccggggatgcccatttcgccgcgcatcgcgatatccgccaggcgcacaccccggctggaggcatcacccgccgcccaggatttgcgcgaaccggcattcggcgcatgccggtacgtacgcaacgcctgcccatcgacaaaggcgtgggacaaggccgcgagcagttgctcacggttggcgcccatcagcttggcggtcaccgccgtggaggcgacttttaccagcagcacatggtcgaggccgacacggttgaacgagttttccagggcaatcacgccttggatttcgtgggccatgatcatcgcttccagcaccgcgcgcagggtcagcggtgtgtcaccgttggccacgcgcttttgcgacaggtggtcggccacggcgagaatgccgccgaggttgtccgacgggtggccccactcggcggcgagccaggtatcgttgtagtcgagccaacgtacgatgcagccgatgtcccacgccgccttgaccggatccagccggaacgaagtgcccggtacacgagcgccgaacggcaccaccgtgccctcgaccaccggccccaggtgcttggtgcactccgggaaacgcagggccagcaggccgcagcccagcgtgtccatcaggcagttgcgggcggtgtccaatgcggcctgggaatcgatccggtaagtgaggacatagtcggcgatgtcctgcaggacctggtcgtactcgggacggttgttctggtcgacgttggcgctcatggcagtactccaaaaaggggttggggtcagtcctcgggctcacggttattgagggcagatctaaggtgtccgccttggaataaagatcacctgtgggagggggcttgcccccgatggcagtggatcggtggatgaatctgtcgactggaacaccgctatcgggggcaagccccctcccacattggatagaggaggacctttagaaagcatcgccggggatgcgtacgaagccttccatcagtactcgggcgctgcggctcatgatggctttttttaccacccattcgccctccacctgggtggcttcagcgccgacgcgcaaggtaccggacggatgcccgaagcgcaccgcgttgcgctcaataccgcccgccgccaagttgaccaacgtcccggaaatcgccgccgccgtgccgattgccaccgccgccgtgcccatcatcgcgtggtgcaacttgcccatggacagcgcacgcaccagcaggtccacatcacccgccttgatcgccttgccactggacgccacgtagtcggccggcttggccacaaacgccaccttcggcgtgtgttggcgttgggcggcttcgtccaggtgctggatcaggcccatgcgcaacgcgccataagcccgcacggtctcgaacattgccagggctttcgggtcgctgttgatcgcgccttgcaactcggtgccggtgtagccgaggtcttcggcgttgataaagatggtcgggataccggcgttgatcagcgttgccttgaaggtgccgacgccaggcacttccaggtcgtccaccaggttgccggtggggaacatcgacccgccgccgccctcttcatccgctgccgggtccatgaattccaactgcacttcggcagccggaaaggtcacgccgtcgagttcgaagtcaccggtttcctgcacggcgccgtcagtgatcggcacatgggcgatgatggtcttgccgatattggcctgccatacacgcaccacagccacgccgttgtgggggacgcgggccgggtcgaccaggccggcgctgatggcaaaggaaccgaccgccgccgacaggttgccgcagttgccgctccaatcaacgaagggtttgtcgatggagacctggccgaacaggtaatccacgtcatgatcggcgcgagtgcttttggccaggatcacggttttgctggtgctcgaggtggcgccgcccatgccgtcgatttgcttgtcgtaggggtcggggctgccgattacccgtaacagcaaggcgtcacgcgcagcccccggcacctgcgccggttcgggcaggtccgtgaggctgaaaaacacacccttgctggtgccgccacgcatgtaggtggcagggatcttgatttgcgctacgtgtgccatggtgtcctctcaggctgtcgccgccgattccaggaagtcctgggcaaaacgctgcaacacgccgcccgcctcgtagatcgacacttcttcggcggtgtcgaggcggcaggtcaccggtacctcgacacgttcgccattcttgcggttgatcaccagggtcaactgcgcgcgtggagtgcgagcaccgaccacgtcataggtctcgctgccatcgatcttcagggtgtggcggtcggtgcccggcaggaactccagcggcagcacgcccatgcccaccaggttggtgcgatggatgcgctcgaacccttcggcggcaatcgcctccacaccggccaggcgcacgcccttggccgcccagtcgcgggacgagccctggccgtagtcggcgccggcaatgatgatcagcggctgcttacgctccatgtaggtctcgatggcttcccacatccgcgtgacctggccttccggctcgatgcgcgccagggaaccctgcttgaccttgccgttttccaccaccatttcgttgaacagtttcgggttggcgaaggttgcgcgctgcgcggtcaagtggtcgccacggtgggtcgcgtaggagttgaagtcgacttccggcaggcccattttcgccaggtattcgccggcggcgctgtcgagcatgatcgcgttggacggcgacaagtggtcggtggtgatgttgtccggcagcaccgccaatgggcgcatgcccttgagcggacgcgccccggccagcgcaccttcccagtacggcgggcgacggatataggtgctctgcgggcgccagtcgtacagcggcgcgactttcgggccggtgtcttcgtggatggcgaacatcgggatgtagacctggcggaactgctccggcttgaccgaggccttgaccactgcgtcgatctcttcgtcgctcggccagatgtcctgcaggcggatttccttgccgttggcgtcgaggccgagcacgtctttttcgatgtcgaagcggatggtgccggcaatcgcgtacgccaccaccagcggtggcgacgcgaggaatgcttgcttggcgtaggggtggattcgcccgtcgaagttgcggttgcccgacagcacagcggtggcgtacaggtcgcggtcgatgatttcctgctggatcaccgggtcgagtgcgccggacatgccgttgcaggtggtgcaggcaaacgccaccacaccgaaaccgagcttctccagctcatggcccaggcccgcttcttccaggtacatcgccacggttttcgagcccggcgccagggacgatttgacccacggcttgcgcgtcagacccaacttgttggcgttgcgcgccagcaggccggcggcgatcacgttgcgcgggttgctggtgttggtgcaactagtgatagcagcgatgatcaccgcgccgtcgggcatttgccccggcacttcatcccactggccggaaatacccttggacgccagatcgcgggtggcaacgcgagcatgcgggttgctcggcccggccatgttgcgcacgacgctggacagatcgaaggtcagcccacgctcgtactgcgcgcccttgaggtcatcggcccacagaccggtgtggcgagcatattgctccaccagggtgacttgctcgtcttcacggccggtgagtttcaggtaggcgatggtctgctggtcgatgtagaacatcgccgcggtcgcgccgtattccggggccatgttggagatggttgcacggtcgccaagggtcagtgccgaggcgccttcgccgaagaactccagccaggcgccgaccaccttctgttgacgcaggaactcggtcagcgccagcaccatgtcggtggcggtgatgccgggttgcagcttgcccgtcagttcaacgccgacgctttccggcaggcgcatccacgaggcgcgaccgagcatcacgctctcagcttccaggccgccgacaccgatggcgatcacgcccagggcatccacgtggggtgtgtggctgtcggtgccaacgcaggtatcggggaaagccacgccgtcgcgcacctggatcaccggggacattttctccaggttgatctggtgcatgatgccgttgccgggcgggatcacgtcgacgttcttgaaggccttcttggtccactcgatgaagtggaaacggtcttcgttgcgacggtcttcgatggcgcggtttttctcgaatgcgtccgggtcgaaaccgccggcttcgacggccagggagtggtcgacgatcagttgggtcggcaccaccgggttgacctgcgccgggtcaccgccttgcagggcgatggcatcacgcaggccggcgaggtcgaccagggcggtctggccgaggatgtcgtggcagacgacgcgggccgggaaccatgggaaatcgaggtcacgcttgcgttcgatcaactggctcagggatgcattgagggtggccgggtcacaacggcgcacgaggttttccgcaagcacgcgggaggtgtacggcaaggtggcgtaggcaccgggggtaattgcctcgacagccgcgcgggcgtcgaagaaatccaggcggctgccggggagcggtttgcgaaattcagtgttcatcgtcaggactcggtcacggtgataacaaagggaggacctgcaccgatccagaattgaaatgcggtcaaaatgtgggagggggcttgcccccgatagcggtgggtctgtgccagttgcatcaactgacagactgcaatcgggggcaagccccctcccacatttgatccggttaacatttcaggatcgtcggcattcccattcagcgacgttcgattggcacgaacttgcgctgctcaacgccggtgtattcggcgcttggacggatgatgcggttgttggcgcgctgttcgaacacatgcgccgcccagccagtcaggcgcgagcacacgaagatcggggtgaacagcttggtcgggatgcccatgaagtggtacgccgaggcatggtagaagtcggcgttggggaacagcttcttctgctcccacatggtcttgtcgatggcttcggagaccgggaacagcaccttgtcgcccacctcgtccgcaagttttttcgaccagcccttgatcacttcattacgcgggtcgctgtctttgtagatcgcgtggccgaagcccatgatcttgtccttgcgcgccagcatgccgagggtgccttcgaccgcttcttcagccgacgagaaacgctcgatcatctccatcgccgcctcgttggcgccgccgtgcagcgggccgcgcagcgagccgatggcggcggtgacgcaggaatacaggtcggacagggtcgaggcacacacccgggcggtgaacgtcgaggcgttgaattcgtgttccgcgtagaggatcagcgacacgttcatcaccttgacgtgcaactcgctgggcttcttgccgtgcagcaggtgcaggaagtggccgccgatgctcggctcgtcggtcacgcagtcgatgcgcttgccgtcgtggctgaagcggtaccagtagcacatgattgccgggaacgcggcgagcaggcggtcggtaacgtcgcgctgcacgctgaagtctttttccggctcgatattgcccaggaacgagcaaccggtgcgcatcacgtccatcgggtgggcgtcggcggggatacgctccaacacttccttcagcgcttgcggcaggtcgcgcagcttgcccagcctggcgctgtaggcggccagctcggtcttggtcggcaactcgccgtacagcagcaggtaggcgacttcttcaaattgcgcatcggcggccagttcgcgcacgtcgtagccgcgataggtcaggccggcacccgcctggcccacggtggacagtgcggtctgcccagccacctggccacgcaggccggccccactcaatacttttgcttcagccatgtctgttctccaatcttgaatttatttgggagtgcgccgggttattttttcgcggcaaacagcgcatcgagcttctgctcgaaggtgtggtagtcgatgcgatcgtaaagctccatgcgggtctgcatggtgtcgatcacgttctgttgggtaccgtcgcgacggatcgcggtgtagacattctcggcggccttgttcatggcgcggaaggccgagagcgggtacagcacgatggaaacatcggcagatttcaactgttcggtggtgtacagcggcgtggcgccgaactcggtgatgttggccaggatcggtgctttcacacgagaggcgaacagcttgtacatgtccagttcggtgatggcttccgggaagaccatgtcggcgccggcctcgatgcaggcggcggcacgttccagcgcggattccaggccttcgaccgccagcgcatcggtacgcgccatgatcacgaagctgtcatcggtgcgcgcatccacggcggccttgatacggtcgaccatttcctgctgggacacgatttccttgttcgggcgatgaccgcaacgcttggcgccgacctgatcttcgatatggatggcggccgcgccgaacttgatcatcgacttgacggtgcgcgccacattgaatgccgaggagccgaagccggtgtccacgtccaccagcagcggcaggtcgcacacgtcggtgatgcggcgtacgtcggtcagcacatcgtccaggccggtgatgcccaggtccggcacaccgagggagccagccgccaccccgccacccgacaggtagatcgccttgaacccggcgcgcttggccagcagtgcgtggttggcgttgatcgcacccaccacctgcagcgggtgttcactggcgaccgcgtcacggaaacgctggcctggagtcatcttgttattggaactcatcattcacctcgtgattggggagtgccgtccgggaagtgacgggcaatgttgcgtttggatgcgccgatatgccggcgcatcaacagttcggccagttcaccgtcgcgatcggcaatcgcgtcaagaatgcggtggtgctcggcaaaggcctggcgtggacgattgggggtggcggaaaactggatgcggtacatgcgcaccaattggtacagctcgccgcagagcatctgggtcagggtgcggttgccggcgccttggatgatccggtaatggaagtcgaagtcgccctcctgctggtaatagccgaggccggcctggaaggcttcgtcgcgctcgtgggtgtgcagcacctggcgcagttcttcgatttccgcgtcggtcatgcgctcggcggccaggcgacaggccatgccttcgagggattcgcggatttcgtagagttcgatcagttcgtcgtggctcagcgacaccacccgggcgccaacgtggggcacgcgcaccagcaggcgctggccttccaggcggtggatcgcctcacgcagcgggccacggctgatgccgtaggtgcgcgccagctctggctcggagatcttgctgccgggcgcgatctcccccttgacgatggcggcctggatacgccggaagacgttctcggacatggtctgggaatcgtcttgcgccaccactggggattccagctgatccagcatattgtcgacacctttaaaagcaatgccgcaaaaactagccaatcagcccaggatagtcaaagaataaatccatattgtcgacaatcgtctaataaccagggttgcacccaataggggcatggccgcctgccagcgctggcgccaaaaaagcatcatgttagaatgcccggcacttttgcctgacatcattggatgaaacggcgtacgagggagtttgcgcagcaatgccagtcgccttgaattgaacatcgcactgccgcctcgggatctatgagactcaaacccttccttctattaatgtgcctgttaaccgcacccggcctcggcgctgccgccgagaagaccgtctatggcctcaacgaatacgcccaactggccggtatcgacctggaagtcgcggccaaactggataccggggccaagaccgcctcgctcagtgcccgtgatatcaagcgcttcaagcgcaacggtgaatcctgggtgcgcttctacctggccatcgacaccgcccactcccaccccattgagcgtcccctggcccgcgtcagcaagatcaagcgccgcgccggtgactacgaccccgatgaggacaagaactacaccgcccgtccggtgattgccctggatatctgcatgggcaccgctttacgcagcatcgaagtgaacttgactgaccgcagcgctttccaatacccgctgctgatcggctccgaagcgctgaaacgctttgatgcgctggtcgaccccagtcttaaatacgcagcaggcaaacccgcctgcgccgccgacgctcataccgccgagtaaaccgaatgcgctctctgaccctgcacctgaagatcctgatcaccatcctggtggtcctgggtatttcggtcaccgcttatcagatcttcgtgctggggatccccgtcaccgaggacgccaccgacgacttgtggaacatcgacgccaaggtcgaattcgtcgccaacccgaaagacccggtgaagatccagatgttcgtgccgcccttgagccgcgacttcgtcagcctcaacgaaagcttcatctcgaataactatggggtaagcgtcaaccgcatcgacggcaaccgtaaggtcacctggtcggcccgccgtgccaagggcaaccagaccctgtattaccgcctggtgctgaccaagcgctacagcggcgaaaaagtcaaagtgaagggccccacgttccgcgacagcattgccgtggaaggcccggaaaaaatcgccgccgaagccctgctggcaccgatccgccagcactcggccgacgtcgagacgtttatcaccgaagcgatcaagcgcaccaacaacctcaacgacgacaacgtgaagctgctgctggcgggcgacccgtcgacgccgcacaaagccaagatcgtcgaattgctgctgtccatcgcccatgtgccggtggaaaaggtccacaccatccgcctggtcgccgaccaaccgcaaaccccggaactgtggctgcgtagcttcaacggcaatgactggttgtacttcaacccggaaaccggcgaacagggcctgcccgccgaccgcctgctgtggtggaccggtgatgaaaacctgatcaccgtcgacggcggcaagaaggccatggtgaccttcagcctgaacaacagcgagatgaacgcgattcgcctggccaagttgaccgacgagaacaccgacgccaacttcctcgaatactcgctgtacggcttgccgctgcaaacccagcagaccttcatgatcatggtgatgatcccgatcggcgtcctggtgatcctgatcctgcgcaacctgatcggcctgcagacattaggcacgttcaccccggtgctgatcgccctggcgttccgcgagacgcaactgggcttcgggattgtgctgttcacgattatcacggcgctggggctgtcgctcaggtcgtacctggaacacctgaaattgcagatgctgccgagactttcggtggtgctgaccttcgtggtggtgctgattgcggccatcagcctgttcagccataaattggggctggagcgcgggctgtcggtggcgctgttcccgatggtgattctgaccatgaccatcgaacgcctgtcgatcacctgggaagaacgcggcgccaaccatgcgctgaaagtggcgattggtacgctgttcgcggcgtccctggcacacctgatcatgagcgtgccggaactgatctacttcgtgttcaccttcccggcgatcctgctgatcctggtgggtttcatgctggccatgggtcgttatcgcggttaccgcctgaccgagttggtgcgtttcaaggccttcttgaaggctgaccagtaatgttcggcttctggaagacctggaaagccctggaagcgcgcgggatcatgggcatcaaccggcgtaacgccgactacgtgctcaagtacaacaagcgcagcctttacccgatcgtggatgacaagatcatcaccaaggaacgcgcgttggcggccggcatccacgtgccggaaatgtacggggtgatcagcaccgagaaggaaatcgacaagctcgacgagatcatcggtgggcgcagcgacttcgtgatcaagccggcccagggcgctggcggtgacggcatcctggtggtcgccgaccgctttgaagggcgctaccgcacggtgtccggcaagatcatcagccatgaagaaatcgagcatcagatttccagcatcctcaccggcctgtactccctgggcggccaccgtgatcgtgcgttgattgagtaccgcgtggtgcccgaccagatcttcaagagcatcagctacgaaggcgtgccggacatccgcatcatcgtgctgatgggctacccggtgatggccatgctgcgcttgccgacccgccagtcgggcggcaaggccaacctgcaccagggtgccattggcgtgggtgtggaccttgccaccggcctgaccctgcgcggcacctggctgaacaacatcattaccaaacaccccgacaccaccaatgcggtggatggcgtgcaattgcccaactgggatgggttcatgaagctcgccgccggctgctatgagttatgcgggctgggctatatcggcgtggacatggtgctggaccaggagaaaggccctttgatcctggagctgaatgcgcggcctgggctgaatatccagattgccaatgactgcggtttgaccctgcgtacccatgcagtggaagcgcggttggaggagctgaacgccgctggcgtgacggaaacggcggaggagcgggtgaagttcgttcaagaaatgtttgggcatattccaccggttgaaggctaaatgctgacctgctctgtacacccgctgccctatcgagccaaccccgccgagtatttcgcggcgattcgccatgcgcctggcgcggtgcttttggacagcggccggccggcggctgagcgtggccggtatgacctgctgagtgcctggccgaacgtcacgttgacagtatcgcccgatgaaagcggtggcgagttcttgcaacgtttgcggaaaaatctcacgcagctaggtgaagcaaatctgcccgccgggtatgagctgccgtttgccggcggactgatcggctacctgagctatgactttggtcggcatctggagcaaatgccgcatctggcaacggacgacctgcacctgccggatgcgcgctttggcctgtatgcctgggcgttgaccagtgatcaccaggcgcagaccagccagttggtgttccatcccacgctggccgagcacgaacggcagcggttgatcgcgttgttcagccatgacgttgccgacacatcggcgacgttcaaactccagggccccatgacgccggacctcaccgccgaggcttaccgtcaggccattgtgcgtatccaggattacatccaggccggcgactgttaccaggtcaacttcgcccagcgtttccgcgcgccgtgcagcggtgatccatgggtcgcttactgcgccctgcgcgaagcctgcccgacgccgttctccggattccagagcctgccggacgagggtgcggtgctgagcctgtcgccagagcgtttcgtgcacatcagcaaacgccaggtcgaaacccgcccgatcaaaggcacccgcccacgcggcctgacgcctcaggaagacgcggccaacgccgccgaactgctggccagccccaaggaccgcgccgaaaacctgatgattgtcgacctgctgcgcaacgacctcggtcgcacctgccgcaccggctcggtcagcgtgccggagttgttcagcctggaaagctatcccaacgtgcaccacttggtgagcagcgtcatcggcgagctggccgacggcaaggacgcgctcgacctgatcgccggcagcttcccaggcggctccatcaccggcgcgccgaagatccgcgcgatgcagatcatcgacgagctggagccgactcgccgtgggttgtactgcggttcgctggtgtatctggatgtgcgcggcgagatggacagttccatcgccattcgcagtttgctggtgaaggatggccaggtgtgctgctggggcggcggcgggattgtggcggactcgcagtgggaggcggagtatcaggagtcgctgacgaaggtgcgggtgttgttggagacactggacggtttgtagtgactgggctggcctcttcgcgggcaagcccgctcccacatttgactgcattctcatgatggaactcggtcaagtgtgggagctggcttgcctgcgaagaggccatcagccgcgctgaaagccttacaggctcaacgaccgattcgaggccttgatgaactctttcttcaaatcctcaaacgtatgcaccgccgggaactgcgggaattcgcggatcacgttttccggcgcatggaacagaatcccacggtcggcttcgcccagcatggtggtgtcgttgtaggagtcgccggcggcgatcacgcggtagtagagggtcttgaaggccaataccgactggcgcttggggtctttctggcgcagttggtaactgactacgcgatcggtttcgtcggtgatcaggcggtggcacagcagggtcgggaaacccagctggcgcatcagcggttgggagaactcatagaaggtatcggagaggatcaccacctggaagcgctcgcgcagccagttgacgaactcgatggcgccatccagcggcttgagggtggcgatcactgcctggatgtcggcaagcttgagcccgtgctcgtcaaggatgcgcaggcgctgcttcatcagtacgtcgtagtcgggaatgtcccgggtagtggcacgcagggattcaataccggttttttcagcgaaggcaatccagatttccggaaccagtaccccttccaggtcgagacaggcaatttccacaagacactcccttatagatgttgttggttgagcgagcaaaaacactgccgaactctagccattcacgctcgccgccgcaacgcagggcggtttttgataccatcgctcccctatagagcgctcagcgccactgacctgtaggaaccgtcctgatgaaccaagccttcgacgtcgctgaactcgccgcgacttatgccaacaaatccgcccaggacattctcaagctggcgttcagccagttcggtgatgacctgtggatttccttcagcggcgccgaggacgtggtgctggtggacatggcctggaagctgaacaaaaacgtcaaggtgttcagcctcgacaccggccgcctgcacccggagacctatcggtttatcgagcaggtgcgcgatttctacaagatcgacatcgagctgatctcgccagaccagagcaagctggagcccttcgtcaaagagaaaggcctgttcagcttttacaaggatggccacggcgaatgctgcggcgtgcgcaagatcgaaccgctgcgccgtaaactcgctggcgtcacagcctgggccaccggccagcgccgcgaccagagcccaggcacccgcagccaggtggcggcgctggaaatcgacacggccttctcgacaccggaacgcaccctgtacaagttcaacccgctggcacagatgaccagtgaggaagtctggggttacatccgcatgctggagctgccttacaacagcctgcatgagcgcggcttcatcagcatcggctgcgagccctgcacccgcccggtgttgccgaaccagcatgagcgtgaaggtcgctggtggtgggaggaagccacgcagaaggaatgcgggttgcatgcggggaatatcatcagcaaggcctgaagttgcgctgtaaaaaatgtggaagggggcttgcccccgatagcggtggtcagccaggtcaatagtgactgacactccgcaatcgggggcaagccccctcccacatttgatttgtgttggccactgaacgtgtacacacacatgtaactatcggtgccatttatgtgtgcaatccatcttgtggcgcaccattacgtaacacctctccccacctgtcttttgtctttgcaaatcgcccggttcccaccaaaaaataaatagctgttcaaacggtcaatttatatcgctttaaattcaactagttattccatgcacctaaaaaaacgaaattacccaaggttttcatagatcaaaaactggcacgcaagtggcttaaggtgaaatacgctttgtatacaataaatacaaaacctacatacactttgccatctgcggcctggctgccgatgtgctggagcctgccggaatgcgtacaagcctctcgaataacatcgcactggatctgccctcctccctgaagcccgaagccatcgagcccagccctctggtgctgagcccacgcctgcacaacaaggacctggcgcccaccaaggttgaaggccggcgctggggtcgctatagcatctttgcgctgtggaccaatgacgtacacaacatcgccaactactcgtttgccattggcttgtatgcactgggcctgggcggctggcagattctgttgtccctcggtatcggtgcggcactggtgtatttcttcatgaacctgtcgggctacatggggcaaaagaccggtgtgccgtttcccgtgatcagccgtatcagcttcggcattcatggcgcgcagattccggcgttgatccgcgcggtgattgcgattgcctggttcggcatccagacctacctggcctcggtggtgttccgtgtgttgctgacggcgattcatcccggctttgccgaatacgaccacaattcgatcctgggcctgtcgtccctcggctgggtgtgtttcgtggcgatctggctggtgcaactggtgatcctggcctacggcatggaaatggtacgccgctacgaaggcttcgccggaccggtgattttgctcaccgtggcgtcgttggccggttggatgtatttccagaccggcgggactatcgcctggtcgatccgcgagccgctgagcggcggcgagatgtggcgcaatatctttgctggtggcgcgctgtggctggcgatctacggcacgctgatcctcaatttctgtgacttcgcccgctcctcgccctgccgcaagaccattcaggtcggtaacttctggggcctgccggtgaatatcctggtgtttgccgcgatcaccgtgctgctgtgcggcgggcagttccagctcaatggccgggtcatcgaaagcccgaccgaaatcatcgccgccatcccgaataccttcttcctggtgctgggctgcctggcgttcctgatcgtcaccgtggcggtgaacatcatggccaactttgtcgcaccggcctttgtactgagcaacctggcgcccaagtacctgaacttccgtcgcgccgggttgatcagcgccaccgtggcggtgctgatcctgccgtggaacctctacaacagcccgctggtgatcgtgtacttcctctccggcctgggcgcgctgctggggccgctgtatggggtgatcatggtcgattactggttgatccgcaaaggccaggtcgacgtgccgcagttgtacagcgaagacccaagcggcgcttattactacagccgtggagtcaatttgcgtgcggtggcggcgtttgttcctgcggcggtgatcgccattctcctggctttgttgccgggtttcgccagcgtctcaccgttttcctggatgtttggcgccggtattgcagggctgctgtacttgctgatcgccaagcgccagccgttctacgccgatgtcagcggcgaaagcattgccgtcgataacgtcagtcattaatcaaggaccttccatgcgtatcctcgtggtcaacgtcaacaccaccgaatccatcactgaaaccatcgcccagcaggcgcgcgccgtggctgcgccgggcaccgagattgtcgggctcacgccgtacttcggcgccgaatcggtggagggcaactttgaaagctatctggcggccatcgcggtgatggaccgggtgatggcctatgaccagccgtttgatgcagtgatccaggccgggtacggcgagcatggtcgtgaaggcttgcaggaattgctcaacgtgccggtggtggacatcaccgaagccgccgccagcaccgcgatgttcctgggtcacgcctactcggtagtgaccaccctggaccgcacggtgccgctgatcgaagaccgcctgaaactggccggcctgtaccagcgctgcgcctcggtacgcgccagtggcatggcggtgctggagctggaagaaaacccgttggcggcgatggaagccatcgtgcgccaggccgagttggccatcagcgaagacaaggccgaggtgatctgcctgggttgtggcggcatggccgggctggatgagcagattcgccagcgcaccggcgtgccggtggtggatggggtgacggcggcggtgaccattgccgagtcgctggtgcggttgggactgtcgacgtcgaagatcaggacttatgcgacgccgagggcgaaaaaagtcatcggttggccgcgctgaagcgttggttcaactgctgctcggcgaattgctcaatgatgaaatccacaaacgcgcgagtcttgccgggcagcagtttgtgttcggcgtagtaaatggagatgttgccgtcgtcgacgtaccagtcgggcagcacccgcaccaccgcgccgctgtccaggaatggcacggccataggcatgctcaccaaggcgatgcccaggccttgggcgctggcgcagcaggcggcttcggagtcgctcatggtcatgctcggcttgagtaccagcgggcggtgttcacgctcgatactggtcaattgccaggaccgtatacgaccggtctgcggtgaacggatgaggatcccgtggcaacgcgtcagatcttcgggcacccgcaccgaaggacgctgcgccaggtagtccggggacgccaccagcactcgatgggccggcgtcaacttgcgcgccaccaccccctgaggcagctcgaagccaccaccaatggcggcatcgaagccctggccgatcaggtcgacctggcggttatcgaaatgccagtccgggctgatgtccgggaagcgacgcataaacgcgcccaacagtggcatcacgtagcgattgccaaatactgtgcccatgctcactttcaaggtgcccaccggccgcccttcggcgctggccaggttggccacggcgttctggatggtggtgaggctgccgctgacctcttcgaggaacagcttgccggcttcagtgagggtgaggcgccgagtgctgcgctggaacaggcgtacacccaagcgcgcctctagcttggcgacacttttgcccaccgccgccggtgtcaggctcaggtgccgcgccgcttcggcaaagctgccaccttcggcgctgcgcacgaaacattcgatactgccaaagccttccatatcgaccactctaaacttttggtttacacagactatagcaatcctggtctaccgggaggggctggcgaggtcgatactcggttccaacaacaaggcatcccgccttgaacagcttggagatcgacatgaccacacaaaacctcagcggcaaagtcgccttgattcaaggcggttctcgcggcatcggcgccgccatcgtcaaacgtcttgccgcgcagggcgcagccgttgcctttacctacgtcagctcggccgccaaggccgaagaactgcagaacagcgtgatcagcgaaggcggcaaagccctggcgatccatgccgacagcgccgatgccgatgcgatacgcaatgcggtcaacgccaccgtcgaagcctttgggcgtctggatatactggtgaacaacgccggcgtgctggccatcgcgccgctggaggatttcaagctggaagactttgaccagaccctggcaatcaacgtacgcagcgtgtttatcgcaacccaggaagcggccaagcatatgggtgaaggcggccgcgtgatcaatatcggcagcaccaacgccgagcgcatgccgtttggtggcggtggcccgtatgcgatgagcaaggcggcgctggtggggttgaccaaaggcttggcgcgggatctggggccacgtgggatcaccatcaataacgtgcagcctgggccggtggacaccgatatgaacccggccaacagtgattttgccgagagtttgattgggttgatggcggtcgggcggtatgggcatgtggaagagattgccagttttgtggcttacctcgctgggccggaagcgggctacatcaccggtgcaagtctgaccatcgatggtggcttcagcgcctaggatttgcggaacaccgcaaatcaaatgtgggaggggcaagtcgaatcgtcgcaccgcccctcccacatttttaaccgcgatcaatcaggctcgaggtggcaggccgtaggccgccaggtcgaagtccgcgagcttgcggatgatctggtcggcgtggtgatacttgctgtcggccatggcttcgtccggcacggcgatggcggtcatatgggcggctttcgcagcagtgacgccgaagggtgagtcttcgaacaccaggcaatcctgcggtgccacgcccaagcggcgggcggcagtgaggaagatgtctggcgcgggtttggcggcgcccacttccgggtcgtcagcggtgacgatggtgtcgaacaggccaaaccattcgcggtgcaaggtggtcttgtgaccaaacgaattgcgcgacgaactggtgcccacggcaatcgggatattgtgcgccttcaagtgccgcaccaaggcttcggcgccgggcatgcccaaggccttggggaaacgctcgctcatcagcggttcccggatcttgaggaattcggccggtgtgatcggcaggtccagcgccttcaccacgtagtccgccaggtcctgggcaccgcgcccgataatgtgctgcttgatgccccagtcgtaggtgcggccgtagcgctcggcgatgatttgcgtgacttcggtatagatgccttcagtgtccagcaacaacccgtccatatcgaaaatcacggccttgatcggaccgactgcggtacgcggtgcattcatcacgacaacccaagggaaagactaaaaggattcagcacaatagcggtgcgggtcccatgcaggcaaccgccatgactttgtatcgattcgattcccgagttgatggcccttcatatcagtgcctcataactggcaacagttataccggtcggtgtgtgcggcgaccgtctacggtttgtgagggcagcgcgaaccgccactggccggcgtctgaaaatatcgcttgataaccttataaaagacttattaatcttccaatgaactccatccactggactagaaaatccgtaaagcaactgcttcggttgcatacgtatcatcagcaacaggtacgcgatgcggtgtcagcgctcgagcgcatgcccgaggcagccaacgtcaaggcattggtcaattacccccatggttatcgcttgcgcgtgggtaattaccgagtccttttcgattgggatcgcgatatccatgtggtcagcattgaagaggtcaagaagcgtgacgagcgaacctactgccgtacagatcatccacaatacggagggcaagccagcctttgtggtgattccctatgaacattatctggcccggcagaacgatccaaatctgattccccatgcggtggtaagccgcctggtggatggggcaacccctatccgtgcatggcgcgaacacctgaacctgacccaggaagaagttgccaaacgcctgggcatttcccaatccgcatttgcccaacaagagtcggtgaataaacctcgccgtgcaacgcgggaaaaaattgccaaggcgttcggcatcaacgccagtcaactggagctatagagcgttacgctggaaatctgccccctcagtcccctcacttaagggcttccacctggatccgcgcatgggccagtgccgtagaggccgatgctacaggccctttagtgccaaacttcacactgcccgaggcaggcaacccatgccggccagggtcgtctccaccgcttcatccagcggcgtgcaaggttcaacgcccaataccgcaaccagccgcgtgttatcgagcagcacaggggtttgccacaggtaacgcatctccagcatttcacggaaggtgacgacaaaaggcgaagctattttcagcagccaccaggggaacatcctgacgacaggctgttgccccgtcctacgcagcaccacgcactggatcgccctgctcacctgtgtgccatccgtgtccacctgccccgccatatgaaaacgcgcgaacgcctccagggtttcacggcgctcgagcagttcaaccatcgtacgcgccacatcgggcaggtacgcccactgatgggcaacacctggcgcccccggatagttgacgctgcgcacgaggttgccaggtttgaccaagccctgggaaaaccagctgttggccgcctgcgcgccgaaaaaatcaccggcgcgcacgatcagcacccgcgccccgttgcctgaagcttcgtataaccgttgctccagttgcacacggatcgcgcccttgcgggtttgcgggtgttgaggggagtcttcgtgcagtacgggaaacgcgtctggcccaaagttgtagacggtaccgggcaacacaatggtggcgccttcagcaacggccgccgcaatggtgttgtcgatcatcggcagcacccgctcggcccagtgccgatagcccggcgggttgaccgcgtgcacgatcacttcacagcctcgggctgcggcaagtacgtcatcgcggttgagtgcatcaccctcaagccagtcaaatgcggcgttctggccacgggccttgtcggcatcacgggtcaacgcgcgcacctgccaacccgccgccagcagttgccgtgcgacttcgccaccaatgccaccggttgcacccaacaccaatactgtattcatcacacgctcccacgctggttgatggggacattttctgcgcggccaggctatagaggaattgtcgaagaccattcaggcgctatacatttatgcatggcaacgaatattggttgggagctttaccggtcgttccttggcgtgttccgggaaggatcgctgtcgggggccgcacggcaactcggcattacacagcccacggtcggccggcacatcgccgcgctggaaacggcgctgggcgtggtgctgtttacccgttcacccaccggcttgttgcccacggccgtggcccacacgctgcgcgcccacgccgaaaccatggagcgcacagcggcggcacttgagcgtgcagcgtctgcccagggtgatgaagtgcgcggcgtggtgcgcgtgtccgccagtgaagtggtcggcgtggaagtgctgccgccgatcctcacgcaagtgcgccgggcacacccgcacctcaaggtcgaactggtgctgacaaaccgcctgagcgacctgttgcaactagaagccgacatcgccgtgcgcatggtccgccccagccaggagcaactgctggcgcgacgcatcggcctgatcgaagtaggcctgcacgcccgcgacgattacttgcagcaacacggcacgcccctgttgatgcaagacctggccggtcactcagtgatcggtttcgaccaggaaaacgcatttatccgcagcctggccatcaagggtttcgagcgcagcgcctttgccctcagcagcgacagcgacctagcccaactggcactgatccgtgccggtgccggtatcggcgggtgccaggtccaattggccaagcgcgatccccgcctgcgccgggtcctgccggaaggctttgcactcaagttggacacctgggtgaccatgcacgaagacctgcgcagcagcccgcgctgccgcgtgatgttcgacgcgcttgtcgaaggtttgcagcgttacgtacaggattgagacagcttcactggtgaagaatcagactccctcagtcccttcacagacgcccccatgtccgaagccttcgaagtccccagcccccacgaaaaacacatcgaacacaccaccgaacatgcccacggccgcggtgacaacttcgccagccgcatcgccgtgatgaccgcgctgatggccacccttggcgccatgctcagctaccaggccggctccaccgaaagcgaagcggcaatggacaagaacaacgccgccatcttcaagaccgaggccgccaaccagtggaactactaccaggccaaatccagccggcaaaacctggcagaactggccacccacatccccggtgtggatgcggtgcattacaaggaagagatcgagcgctatagaagccagaaggaagacgtgcgcaaacaggccgaaaagcttgaggccacctcaaaggaatgggatgaaaagtcggaacaggcgctgcaccagcaccatcgctgggcccaagcgatgaccgcgattcagatcgcgatttcgttggcggcgatcaccttgctgaccaggcgggaatggttgaagcgcctgtcgtatacggcaggcggagcagccgtgatattggggagcctggcctggctgcatttataaaaaatccccttgggcgccagagccttaccgctacatagtaaacagcataacgaaacccgaggagataccggtgtccgcacaacccaaggaagctgtgggcgccgcctacagcatcgacgccatgcgctacgcccaaggcatgacctggcaagccatcgaacacctcgcccaacgcatccgccccggcatgctcgaatccgaagcccgcgagctgggcaaacacgtcctcgccgaactcgacatgcagcgcatctggcacccactgctggtgcgctttggcgccaacaccctcaagaccttcaaacaacgctccgacggcgatccgatgctgggcgacaacgacatcttcttcatcgacatgggcgccctctggcagggtcacgaaggtgacgccggcgccaccttcgccatcggcaacgacccggacatgcacgcctgcgccagcgccgccaaagcactgttcgaccgcgtgcaagcccgctggaaaaacgaccaggtcgtcggccaggagctttaccgctacgccgaagcacaagccctggccatgggctggcaactgaacctcgacatcaagggccaccgcgtctgcgacttcccccacgccatccaccgcggcggcgacctgggtgacttcgagcactacccgaacgccggcctgtggatcctggaaatccagatcgcccatccgagcaaaccctacggggctttctacgaagacctcctcgcttaaggaacgcaaatgaaccgcgccaccgaacaccccgtgctgttgttttcctacggcacgttgcaggacaaatccgtacaactggccaacttcggccgggaactggcgggccagcaggatgcgatgctgggctattcacagagctgggtggagatcaccgaccctgaggtgctggcaagcagtggcaagacgcatcatccgattgtggcgccgagcgctgaggcaggcgccaggattgaggggatggcgttccggattacggagcaggagctggcggcggcggatgcgtatgaagtggcggactacaagcgggtggaggtggggttggcttcggggttgagggcttgggtgtatgtgcgggcgtgatatgaacaagggcggctgaattggccgccctttcgagagagtaccgagcctacttgcacaccattgacacttgagtttggtgctcatactcccaccctctacacgccaaccctacgtgcttgggaatcaaagcagcaccactgctataggccgtgatagtcctacgtgagaagcccaattcgaccgcagcggcggacagggaaagattgttgctgagcatccactttctgaaatcctgcgtgagcataacctcgccggactgctccagtgccaggcggtgcaaggtcacggcagacagctcaaggtcattgccccatgtcacatcaaagccccattcacctacagctacttggctgaagagccccaggtccataagcggcttgaggatggggaaagtttttatatgatcgatgagatcgacggtatgttgcttaccattgttccactcgatttctagagcatgcttgccggcaactggttgcacagcagaaatgcgaagcttgctggtcataagtcagttcctccggttttgttcatcccatacccgatgaagatcagcgatatgagcttttgcccaattcagggcggctttcaaggcctttgtttcggcacctgcgccaagcacgacaagcccttctatctgaaccaaacactcgccatccggggtctgcacgtgaaagtgcggtggcgcgtggtcgtcgggatagatttttattttccagtttcgttcactgtgaagagtagccatgaggtcagatgctagagaaatattttccctggcacaactcgattttcttacctcgatagtcccgagaccttagctttctggaaacctatagcaatcggttgctggcaccttgagcaacatcacaagtttgcgaaatgtcctacgcgctttccggaagcgccactctcccacctcatcatctccatgcctatagtcaccgggtcgctcgaagagcgattgggtttggcgacccgactacaagacggcagaagcctcccggcagatttgcgggatgcccctgtacgcaataagctgctccatggtggctgtgcgtgggagaccttcgggtctgccggtctttgtccgttcttgtcccggttcgccaacctgcgtacagctgccaccttttgtttggcgacaaatgcgtggctccccccctaagtgaacggacttaacgcatgaaccaatacatggccctcaccagcaacgacagcaccacacccgccctttttgtcgacacaaccgtcccgcttgaaatcctcctcgacgctgcgaactatcgacttcgtgctgtgacgcaggtgcttgaaaaccttgcgctgcgtagtgagataagcagcgatgcggtggtactcagcgactttgctttactgtgctctatcccgttgcgggatgggtgtgacttgctggatatcatagagcggcgaatggatgtatcgcagccttagaagatattgcatgccgctttaggactatagctgccagtttcccttggttcggtataccaatccaaggggtgctggtttccgagggccgtgaaaaggcccccacacttggcacagatgtgggggccattgaacataagcggcgttattggtaatcctacaggtctaaacctttatggatttcatctagggtcacatccagctcttggttcaactggtcatgtacggtttggctgactaacccatgagtcagcagcgcagccagatagcccagcgtgtacatcgcaaagccgtgccgcttcgccggttcgttcttgaccctttcgatgttttctttcaagaggatgaatttactacgcgcttcggcaatggtgcgcgggctgtctttttcggttgggagcatcggcatagcggggattcctttctgttcgtaaagccttattgaaaggcttgccacaattgatagcagaaaatccacattaacagagagcctgcagccaaaccgcttagcactgaagggaccaaaaaaaaccaccataccctctgtgaccgaacttgaaattactgacttgatgcgatgaaccgctggataagttctggcccactcatgttttgtatcatcgcgctcgttcgagacatatggatgttgctccatatcatcttgatgacctcccaagctataaataacaccagagaaagcacagcaagaagcccacagagggcatacaaccgaggcggtagcttcggggaaagtgtggaccaaagcccaaaaaaccctgcatagcctgctactaagatgaggttgatataggttcctgcactagccatctgcctttcgtgcatctgtatcagtgcgttagcgcccttatctccttccagatgaagctgaaattctttgagttcatcaatagcttccgagtgcgtattcaccacggtttccacctgctcgttccattgctgctgattcatctcgttccgctcctttggagagttattacagatgggctcgtggacgcaaatatcgaccggcgtcgagcccaatatgcgccagatgatttggcgtgaaaaccaccctaagctcccgggttccgcacgctccgtttttcgcaccaatatagagcaccagtcccatggtggtcccatgaggctattttttggacgccaaaaaccacaaacccccgactttctctaggaaaatcaggggtttgcgttttcgtaatttggcggtgaaggagagattcgaactctcgatacaatttcttgtatacacactttccaggcgtgctccttaagccactcggacacttcaccgtatctcgtcaaaccagttcagtctgtcgaggcgcgctaatgtagtcgaaagcctttctgatggcaaaggtttttttcagaatattcatgcggttagccggttatgccgctcaccgcccggcaacgggcggtgattgtgccattctcaggcatcggcggtagacgtctggggcggcgattgcgccctgcgccaggcattccgatgcgctgtgcagggcaaaagcctgaccggccagtcagtcacagcgctttaccggggcgggcgtggtgggtaacgtctgctgcattcttctataacaagtcctacaaggaaccgcgtcatgagtgagttgattgcctaccacctcgaagacggtatcgcgaccctgaccttgagcaacggcaaggtaaatgccatttctccggcggtggtcagtgcctttaatgaagcgctggaccaggcggagaaggaccgggcggtggtggtgatcaccggcacgccggggattttgtcggggggttatgatttgaaggtgatgaccgccggccccaaagaggccatcggtctggtgacgtccggttcaacgttggcgcgtcgcctgttgtcgcacccgttcccagtgattgtggcgtgcccaggacacgcggtggccaagggcgcctttttgctgttgtcggcggactatcggattggggtggatggcccgttcagcattggcctgaacgaggtggcgattggcatgaccatgcaccacgccggtatcgagttggcgcgggatcgcctgcgcaagtcggcgtttcatcgttcggtgatcaatgccgagatgtttgacccgcagggcgcgttgcaagccggcttcctcgacaaagtggtggcaccggaagagctgcacgcggcggcgctggaagcggcgcgtcagttgaagaagctcaacatgaacgcccacaagcacaccaagttgaaagtccgtaaagaactgttggaagccttggacgacgccatcatccaggaccaggggcatatcctgagttaagccctacgcgtgatgtaccaaagcccgaccttgagtcgggctttttcttacaaccaattccgaatcatcttcagccgctctagcttgcccgtatcgacagatgttgaaacatgcgcttaaacatcgcctatctcctacctctaccggggtaattgccgaatacagtgcacaaccgtacactgcgccaccttttgtgccggtgggccgtgtcgatgcttttcctgttgcgtatgttgttgatgggcctgcactttatgcttgccggcgtgctcggcgtgctggttggtgtgtgccggccgttcaacccggacaacagtcgcctgtgcgcacgcctgtacgcgctgccggccatgtggatcctgcggctcaacgtgaaggccgatgtggactcgctgcgcaacaagcccggcacctgcgtgatcatcgccaaccaccagtccaactatgacctgtttgtgttcggcaccgtagtgccctaccgcacggtgtgcatcgccaagaaaagcctgaagtgggtgccgctgttcggccagttgttctggctggcgggcaatgtgttgattgaccggggcaatgcccacaaggcacgccgggcgatgcttaccaccacccacacgttgcagcacgaagacacttcgatctgggtgtttccggagggcacgcgcaacctgggccaagggttgctgccgttcaagaagggcgcgttccatatggcgattgcggcgggtgtgccgattgtgcaggtgtgtgtcagtaactacgtgacacatatgcagctcaatcgctggaacagcgggggtgtgctcatacggtcgttgccgccgattcctaccgttggcctgacttcggatgacatcccggcgttgatgcaggcgtgtcatgcgcagatggaagcctgtattgacgagatggaccgcgagttgcgggctgcctgaacactgcttgggggcgcttcgccccccagcgcgagcaagctcgctcaccacaaaatgctcgatgcaacgacggaacgccattcaggctaagctgcccaacacctgtcatcccaataagaagcgatcagcaccatgggtagagttgttgcggccgccgtctacagcgccggtaagaaagtttcggatatcaccctcgatgaaggcgcggcctgggccgccaaacccgaccactttgtgtggatcggcctggaagaacccaacgcccaggagctggccaacctgcaacgccagttcaacctgcatgaactggccatcgaagacgccctggaaaaacacagccgccccaagctggaaaccttcggcgatgcgctgtttatcgtcacctactcaccggtgcgcgagaacggcaagctggagtttatcgaaacccatatttttgccggcaacggctacatcatcaccgcccgcaatgggcactcggcgtcctacggctttgtgcgccagcgttgtgaggcgcggccgctgttgctggagcatggggaagatttcgtactgtatgcgctgctggatttcgtcaccgagaactaccagccggtgagcgaagcgatccacgccgagatcgatgaactggagcgcaacgtgttgtgcagttcgttgagcgagcgcgatatccagaacctccacggtttgcgccgcgatgtgctgcggctcaagcgttacgtggcaccgatggtggagatcagccaggagctgcagaagctcagcttcccgttcatcgacaagaacatgcgcccgtactttcgtgacgtgcagattcacgtgacgcggcagatggaagacctcaccaccctgcgcgatatcgccagccagaccatcgaaatcggtgtgttactggaggcttcgcgccagagcgtggtgcagcgcaagttcgccgcatgggcggcgatcctcgcattccccaccgcggtggcggggatttacgggatgaacttccagaacatgcccgagctgcaatggcactacggctattttgcggtactcgggctcattgccacgggttgcacggggttgtgggccagtttcaaacggtcgggttggctttaaacctgagcttcggacttgtgcgccacaaaccgcatcatccattccgccacggttgcaccgtggtggtcgcgctcaaggctggctacgccgtttgtgtagaccttttcgcccagggttgtctgaagaatctccagcaactcgcgggaataatcatggacaaattccgggtgtccctggaagcacagcacctggtcaccgatgtgatacgccgcgaacgggcaaaacgcgctggaggcgatgacggtggcattctccggcaacgtggtcacctggtcctgatggctgatcaatagggtcaattccggtacttcagggctcatccacggggccttggcatcgagctggtagtcgtggatgcccatgccccagccttggccggcgcgctcggtcttgccgcccagcaacagtgccagcaattgatgaccgaagcagatgccgagcagcttgtcgccacgctcgtaacggtcgagcaggtaggtcttgagagtctggatccatgggtcagtgccgaaggagtcggccttgctgccggtgaccaggtacgcgtcgaacacttcgtcgtccgaggggtattcaccgttcaccacgttgtacaccacgaactcggcgggaatcggctgcttggcgaacaggcgcttgaacatctgcccgtacccttggtattgatcgatcaagcctggacgcaggatatcggtttccaggatacagacgcgtagcgacataaaaaatacctgacacggtgatgggaatattgcacaccccagagcctgccttgaaataccccttcaaggcaagccccccagcttcaccggaacacttcaccctgcgccgctttctccagcaacaaccccggcagcatgaaacgttcgccatactgttcagccaggtagcgagcgcgggcgataaagtccttcagcccatattggttgatgaactgcaacgcaccaccggtccaggccgcgaaaccaatgccaaaaacagaccccacgttcgcgtccgccgtggacatcaacaccccctcttccaaacagcgcaccgtctcgatcgcctggataaacagcaggcggtcgcgtacatcctgcggcgagatgcgctgatcaggtcgctcaaagcggcttttcaactccggccacaggtacttttgcccgccgctggggtactcatagaaaccgcctcccgccgccttgcccgcgcgcttgtattcgttgaccaacagatcgatcaccgctgtcgccgggtgcgtaggcagcgccttgccttccgcctgcagatccttggccgtctgctgtcggatatggctcatcaggctgagggacacttcgtcagacaccgccagcggccccaccggcatgccggccttgcgggcttcggtctcgatcatcggcgcggccacgccttcgccgagcatggcgatgccttcgttggtgaaggtgccgaacacgcgtgatgtgaagaagccacgactgtcgttgaccacgatcggggttttcttgatttgcaggacaaaatcgaaaccacgggccagggtctcgtcactggtgcgcgcgcccttgatgatttccaccagcggcatcttgtccaccgggctgaaaaagtgcaggccgatgaacttggcttgatccggcactgccgtggccaggccgctgatgggcaaggtggaggtattggaggcgatcacagcgtcggcgccgaccaccctttgcgcagcggccgagaccttggccttgagttcgcggtcttcgaacaccgcctcgatgatcaggtcgcagcctgccagatcagcatcggatgccgtaggacgaatccgcgccaagacggtttcctgctgctcggcggtcaattgcccacggctgaccttcttgtccagcagcaccgccgaatgcgccttgcccttctcggcggccgccaggttgatgtccttgagcaccacctcgataccggcgctggcgctgacataggcaatgcccgcccccatcatcccggcgcccagcacaccgactttgcgcgtgacatacggtgtaaacccttgcggccgcgaactgccggcgttgatctcgttgagctggaaccagaaggtgccgatcatgttttttgcgacctgccccgtcaccagctcggtgaagtaacgggtttcgatcaggtgcgcggtgtcgaagtccacctgggcgccttcgacggccgcacagagaattttctccggcgcggggaaacagccgttagttttactgcgcaaaatcgacggcgcaatggccagcatctgcgccacttttgggttcgatggtgtaccgcccggaatctggtaggccttgttgtcccacggttgcctggcgtccggattggccaggatccaggctcgggatttggccagcaactcatcgcgatccgccgccagctcgttgatcaagccggcttgcagcgcctgttgcggccgcactttcttgccttcgagcaaatacggcaaggccttttccagcccgagcatgcgcaccatgcgcaccaccccgccgccgcccggcagcaggcccagggtgacttccggcaagcccaactgcaccgacttgtcgtccagcgcaacgcggtaatggcacgccaggcaaatctcccagccgccccccagcgccgcgccattgatcgcggccaccacgggcttgccgagggtttccagacgccgcagttgcgctttcaacacccgtacaccgtcgtagaaatccttggcgtgggccttgtcgaccttgatcagttcattgaggtcgccacccgcgaaaaacgtcttcttcgccgaggtaatgacgacgccggcgatgctatccctttccgcctccaggcgctccaccgtagccgccatggcctcgcggtacactgcgttcatggtgttggcgctctggccgggcatgtcgagggtcagcaccacgatgccgtcctggcctttttcgtaacgaatggcttgggtcatgacaagttccttgggctcagaggcgttcgataatggtggcgatgcccatgccaccgccgacacacagggtggccaggccatagcgctgctggcgtacttcgagttcgtcgagcagggtgccgaggatcgcgcagccggtcgcgcccaacgggtgccccatggcaatcgagccgccgttgacgttcacgcgtgcggcgtcgatgcccatgtccttgatgaacttgagcaccaccgaggcaaacgcttcgttgacctcgaacaggtcgatgtcttcaacgcgcagtccggccttggccagggccttgcgcgtggcgggcgcggggccggtgagcatgatggtcgggtcggtgctggtgaccgctgtggcgacgatacgcgcccggggttgcaggcccagctcgcgccccttggcctcggagccgatcaacatcagcgcggcgccatcgacgatgccggaactgttgccgggggtgtgtacgtgatggatgcgctctacgtggctgtagacacgcaacgcggtggcatcgaagcccatctgcccgatcatttcgaaactcggcttgagcttgccgaggccttcaagggtggagtcgccgcgaatgaattcgtcatggtccagcagcacgatgccattctggtcctgcaccgcgatcagcgacttgttgaaggaaccgtctgcacgcgccctcgccgcgttctgctgggaatgcagggcaaaggcgtcgacgtcctcgcgggtgaaaccttccagggtggcgatcaggtccgcgccaataccctgtggggtgaagtgactgtgcatattggtctgcggatcgagcacccaggcgccaccgtcactgcccatgggcacgcgggacatggactcgacgccgccgaccaccaccagatcctcgaagccggagcggactttcatcgcccccaggttgaccgcttccaggcccgacgcgcagaagcggttgacctggaccccggcgacgctgatgtcccagtccgccaccagcgcggcggtcttggcgatgtcggcgccctggtcgcctaccggggtcacgcagccgagcacgatgtcgtccacctggtgggtgtccaagtcactgcgcagggccagcgccgtgagcaggccggctaccaggttcaccggcttgacgctgtgcagggcaccgtccgccttgcctttgccacggggggtgcgtatcgcatcaaagatcaacgcttgggtcatgacgtcctcgaaccagtgtgcatgtgtgcctctaccttaggcccgattgacacggtttcaatgacggatgcgctcattgcttttgaccccctcgctcggacgaacggtaggcacctaaggtaatcacctgattaatcgttttagctgtctagccaaggcattggcgccaagatggcgatatgcctcatgcctttttaagctgaaattctgattagctgatatgaaatgagtctaagccgcgaagaacgagggctctaaggttgaatcagtaagaagttgctgccgggttttgctggagcaactgtaagaaaagcgacacgtcatctcgccatactgaaataagaccggcacgcatttgacgctcaggaataacaacaaaaggcagtcagccatgttcaaacattcgaaagtacgtcaggcgggactcattctgttcgccaccacactgattctgatcttgcccaatttgaccaaggtcattgggtgaccccccaacgccacattccgtgcattcacagcaccgggtctgcagcttttggcagcgcctgccaggacattgcgcatagcggtccggcaggggctgtctttttgcgcgccgatttccggtatcgttagcttaaacagccctttgattcgagcctgcgtcttgaaagccatccttgccctcctcgccctgctgatcgcgcttcctgctgcggccgcgcaattgaccatcgaactcaaccactcccgcaagacctggcagaccgccgacttgctcaagcacccgcaagcgcagacggtgcagatcgacgatgacgtctcctacaagcgcagcatgagttatcgcgcagtgccgctggccgtgctcctaccgggtttgaaacccgagagccatctgcaagcggttgccctggatggattcgccgccgaactcaccgccgcgccgttgctggaacaacagggtgcacgtgcttggctggcggtggaggatcctgctcaaccctggccggcactggcgcagggcaaacccagtgccgggccattctacctggtgtggaccgacccgcaagccggggctatcagccctgagcagtggccgttccagatctccgggatcaagcagttgaacacggtagcggagcgctttccggcgttgttgccggatccgaagctggcggccaacgacccgatcaaccagggttttgccctgttccagaaaaactgcctggcctgccaccgcatcaatggcgccggagacgcccaggtgggaccggacctgaatatcccctacaaccccaccgagtattttggcggtgatttcctcaagcgctatatccgcgacccacagagtttgcggaattggccgcaggcgaagatgccggcgttcgcggccagcgtgttgccagacggtgagctggatctgttggtggggtatttgaagcatatggccgggcgtaaacagcaaccttaaacatccggtggtgaacgcgttgtggtgagcgggcttgccccgcgttgggctgcgcagcagccccaaaaccaggaaccgaagaaactcctgacacaccgcattctgcttgatcagggctgctgcgcagcccaacgcggggcaagcccgctcaccacaacaaatctgctcaccacaacaagtccgccagccacaacaccccgctcgccgcaaccgaatcattgctgctggacggaaatcaccggcgtcggcgccacgaacaccttcgcatgcatctgctcgtgccccccgccccggcgcatgccgcgcaccgggcaagcgtctaggtaatccagccccaccgccagcttcaagtgccgctccgggcgggccaactggttggtcacgtcaaagctgtaccaggcgtcatccagccaggcttcggcccaggcgtggctggccaggtgcgtgctgtcctcggtgtacaaataccccgacacataccgcgcaggaatgcccaggctacgcgcacaggccaggaacgcgtgggtgtggtcctggcacacgcccgcacggccggcgaaggcctgggcggcgcaggtgtcgacctcggtcgcgccgggcgtgtagaccatcgcctggttaagtgcctgcatcaggtcgatcaatgccgtacggtcgcgccgttgatggcagtgctgttcggcaaaaccacgcagggcttcatcgggttcggtcaggcgcgtgcagcgcaggaacgggaacgccgattggctctcatgctcggcctcgcgcaactcgtcgatgtccacctggccacgcgcgccaatgatgatggcgtcgtggggctcgtccagggtcaacacatgcaggatgttgccgaacgggtccacctgggcacgcaccgggcgtggcaggtcaagttgccaactgagtacatgctggcgctcgctgtcatggggcgtgaggcgcaagtattggatgctggcgcgcacctggtcttcatagtggtaggtggtttcgtggctgatggagagtctcatgccgcctccaggtaggaactgtagatggcgtcgcccaactggcggaccaaaggaataaagtcggtcagccaggcgtgcaggccttcctcaaggatttcatcgatggcggtaaagcgcaggcgcgcatccatctcggcggccaggcgctgggccgggcggccgttgatgccaggcaggctggcgagtatctggtcgatctcttcactgcaggcccgcagtgagcgtggcacatcggcgcgcaacagcagcaactcggcgacttgccgtgcgccgggcgcatcgcgatagatctcggtgtaggcctcgaacgacgacaaggcacgcagcaaggcgctccattgatagtaggcgtgggccgtgccatcggtgacagcctcggcgcggtcaccggccatctcatagcgggcgtccagcaggcgcagcgtgttgtcggcccgttcgataaaagtgcccaggcggataaatcggaaagcatcgttgcgcatgatggtgccgtaagtggcaccccggaacagatgggagcgctccttgacccactcacagaaccggctcatgccataacggctgaggccctgctgggcgatatcgcgaatatccagccaggtggcgttgatgttttcccacatatccgcggtaattcgcccacgcaccgcatgggcgctggcccgcgcggcgccgagacaactgtagatgctggccgggttggccgcgtccagcgcaaaaaagtgcaacaggcgttcggcgtgcagttcgccgtgacgttcgtggtaatcgtccagggtgccggtaatcaatagcggcatggccagttcatgcaggccgtcgccgcgcccatcctggggcatcagtgacagcgaatagctgacgtcgagcatgcgtgcgaggttttccgcacgctccaggtagcgcgacatccagtacagatccgaggcagttctactcaacatggcatcagtcctcgaccacccaagtgtctttggtgccgccgccctgggacgagttcaccaccagcgaaccttcgcgcaaggccacgcgggtcaggccgccgggcactacacgggtctccttgccggacaacacaaacgggcgcaggtcgatatggcgcggcgcaatgccgttttcgacaaaggtcgggcaggtggataaacacagggtcggttgggcgatataggcgtggggcttagccttgatccgtgctcggaaggcttcgatttccgctgccgtggacgccgggcctaccaacatgccgtagccaccggagccttgggtttccttcaccaccaggtcgggcaggttggcgagtacgtgggatagctcgtccggtttacgacactggaaggtcggaacattcttcaggatcggttcttcatccaggtaaaaacggatcatctcggtgacgaaggggtacaccgacttgtcatccgccacgccggtgccgatggcattggccagcaccacattgccgcagcgataagccgcgagcaggccggacacgccgagcatggagtccgggttgaaggccaggggatcgagaaacgcatcgtcgagacgacggtagatcacgtccacggccttgggcccatcggtggtgcgcatgaaaacgcggtcatcgcgtacgaacaggtcggcgccttccaccagttccacgcccatctcgcgggcgagaaaggcatgctcgaagaacgcgctgttaaagcggcccggcgtcaataccaccacgctggggttatccagggggcttgagcttttcagcgtgtcgagcagcaggttgggatagtgatcgatgggcgcgatgcgctgggcagcgaacagttcggggaacaggcgcatcatcatcttgcggtcttcgagcatatagctgacgccgctgggtgtacgcaggttgtcttcgagcacgtagtacgtgccgtcgccatcgcgtacgaggtcgacgccggagatgtgggaatacaggtcgcggtgcaggtccaggccctgcatcgccagttggtattgctcgttggccagcacctgttcggcaggaatgatcccagccttgatgatgcgttgctcgtgatacaggtcggcgagaaacatgttcagcgccttgacccgctggatacagccacgctcgacaacccgccattcgctggcgggaatactgcgcgggatggtatcgaagggaatcaggcgctcggtgccctgctcgtccccgtagagggtgaaggtgatcccggcgcggtgaaacagcaaatcggcttcacgccggcgttgagccagcaattcaggcggggtttcggccagccagcgggcgaactcgcggtaatgcggtcggaccaggcctgccccatcgtacatttcatcgtaataagtgcggatcatgccgaactccttgtcacccgggcgaaagaaccatcgcaaggcccgtgccagcggcataaacacttaaaaatcagtgagttgaattaaccacgcaatctgctcgcaccgtcctggtgcgcagaatgcccagtgcactgccccacgcttcatcgcaatgcgggctttgactatcaacagcatagtcagagttgatttcactgcccggcgcaggctgcggataatcggccccatctgctgaactgccttcagcgctccgctcttccctttaggccacccgtatgggtggcctttttttggtgcgtaaaaatagcgcgcaagttccgagttattttcccaccgcacaaacaaaatcggccgacccaaaggccagccgatacgctgtgttgctcataaactgccgctacatgggtaacccacgcacctcctgcttcacgccccatccttcgatgatcccgcccagcggctcgaccaccgccccgaagtcttgctcgaaatctcctatgccgtcgtaggtcgcaaacatgactttgctcagttccaggtaccaggcgccatcgtcgcgcgcactcacctgggcattcagggattccccgcgaaactcacccgcagccctgcgcgcccgttcctcatccgggaaaatggcgtagaactcgatggggtgaaaacgcgagaagtcgaagccgccttctttcatgcggcgcagaacattggtgctgatgtcttcttgataggctgtgctcatgaaaagtgctcctcaaattgatggatagactttccgtgcttcccgaagcccacgccgcaatggcgtggggactacggcaacaacatcaccgctggaaaacaagcatgtagctgacaagaccagaactagcgattcattcgctgatctcgtttgcagagtagcgcgaagctatcacctccaccagaggcgcttggatggactacagggaatgttcaggcggcgggagagatgtcgaggatctggatgctgttctggtctttgaggatcttgaccgtcggctcgggcttgcggccctccagatcattgaggtccagttcggcggcgacgggcaccagcttgttgcgaatcatgtgcgcagcgtcttcgaggctgggcttgtgttcgcaggtgaactgctccacggtctgcacgccgtgatcatcaacgaaggtaatttgccacgtttgcatcggtgcctcctcgataaaacccatgtgtgggcttacacatatctggaccttgagcgctggacaaacgttccactcaaggccggaggcaccggatcagctgcagttatttttccgcgtgttgcttcaaggctttcaaggtgttgaacggagcgtccaccacgaacttgttggccagccacgagggcacgctgccgcctggctcggtatgcacctggtaggtgacttcggtcaggttgtcgcctttggggaccagtttccagaagccttcaacctgggctacgcgtacgaagcctttttcttccggctgataagtaggaacctccagcaaggtccgagtgacactgccatcggcacccttggcagtggtgattttcaggatcgaatcacgattactgacggggaacggcgcattgaactgggtgtaggtatagctgacgtcaccctcatgtttcagcagcttctgcaatttgcactcatgaatccacttgcacgcaccgactacgtcttcctgcaacgcgacgatcttcgccaccggtgccttgatcgtggtcaccccgcgatacgccttgtacttggagccggcaatttcgctcagggacaccttgataccgtcttcgtccttggcgacttgccaatcctcagcctgggcagtggcagcaaacaacaccgtaaaaccgcacaacacagccattcgtttcagcgaacccattgttgtattccttattgttgaagttccgatagtaaagcccatcaagccgccgtcatctgctcccaccagccgatcaagcggatcgcatcggcctggtcggtgccgcagacctcgagatccgccttgaaatcactgcacaccgccggtcgctccggctggccgaacagcaggcatagctgttcgaccgataggtgcaggcagcgttcgcccgccggtttgccctgtggcatgcccggtaatggcgaactgatggagggggcgatgcagcaagcgccacagccttcacggcaattcatgaccagcaggtcctcgacgactcaatgtggatggccggactagagtacgccctaaaacagccgttttaaaatgggttaacaggggtttttcgcagaaaacaaaagtgactgaccagtctgcgacagatggtcgagggcacgcgtcacgtttgtgggaaaagtttactgcttgaactcgaactccaccgcggcgccttcgacttcgcgccgttcttcgttgcgcaattgcagcttcatttcattgctgagcaggcggccgttgatctggaaggcgctgttgtcggtgggtttctcaccgaacatcggcggcagcaagggcacacttttgggtttgggcatggtaccgataggctgcaagtgcctgaccatgtccgacggcagggacaggtccaactgtgccggtggcaattgtgtctgcgtcacttcgcgggatgccttggacttgctggctgcacgttttttggcggcagcggtgggtttcttcaccgctggggcttttttaacgggagccgtttttttcgcggagggcttctgctcgttactggcggccggcttggtttcactcacaggcgctgccgccagcactgtgccgacgttgcacaggcttaacaggccaattaccagaacagcgcgaaaaatacaggtcatatcgcctacagcattaacggcagagggccatatgctcgcttgttgtgcgcggcatgacaagcacagtgattagtgtgctagaggatttgtcccctttctgagcgtcataatcctgctgctgtttcctggcataactggctcgccagcatccccaacgtcatcagcgcccgctctgcctcgcggttccacggggtgccgcagttcaggcgaatacagtggttgaactgctccgtattactgaagatcagccccggcgcaatactgatgccctgttgcagtgcgcgcacgtgcagttcctgggtattgacccttccaggcaaactgacccacaggatgaagccgcccgtcggacgggtcatctgggtgccttccgggaaatactgctgcaccgccagttgaaaggcgctgaggttcttgcggtattcctggcgaatgtagcgcaggtgccggtcgtagccgccattctccaggtaagcggcaacgcccatctgcgtgacactgcacgcggagtgggtgctgaacatctgcaggcgctggatctcctgctggtatttgccggcgatcatccagccaatgcgcacaccgggggacagcgtcttggaaaagctggagcaatagatgacccgatccaggcggtcataggctttcagcgccttggtgcggcccagttcgaacatcagctcgccgtagatatcgtcctcgacaatctggatgtcgaagtccgaggccaggcgcagtaactgtttctgccgttcctcaggcatggtgccgcccagcgggttgctcaggcgcgtggtcagcaccagggccttgatcgaccattggttggccgccagttgcagggcttccaggctcatgccggtggacgggtcgctgggaatctcgatgaccttgaggcccaacagatcggcgagttgcagcaagccgtaataggttggcgactcagcggcaatcaggtcgccaggccgcgtcagcacccgcaacgacatctgcaacgcatcgacacaaccgtgggtgatcaccacttcggacgggtccaccaccacacccgcatcgcgcatgcggatcgccacctggcggcgcaacggttcgaaaccggggctgaacatgtagctgaacgcacgcgggctctggaagcgcgtgaccttggccaattgctggtgcagggcgcgtactggcaggtagtccacgctcggcactgcagcgcccaacgggaacacaccttcgcggcgcgattcgcccaagacctgttgaatgatactgctgcgggtgaccaaccctgggcgctcgacccgtgcaatgtccggcgtcggcgccgtgagtgctggcgtctggtgcacataatagccggactgtggccgcgcccggatcagcccctggtcttccaggttggcgtaggcctgcaacaccgtggcgtggctgacgttcagctgtgagctcatcttgcgcaccgaaggcacgcgctcgcccggttgatagacaccgcgccggatatcctcagccagttgctgggcgatacgttggtaaagcaacagattggtcatgacgcagcactcgatttcacgggtattttatttttgtgtgaaacataccggcacagtttagaagtgtacggggacagttgccacaatagtcgagcgcgcgtttgagtgacagtaaaactgtgagggtgcacaccaaaaaatgtgggagggggcttgcccccgatgacggtgggtcagcgacagatttgctgactgatgcaccgctatcgggggcaagccccctcccacattcagagcggctccaggcttctatcgggcagcgcccagttggcctttctcgtcagagaagacgatttcaacgcgacggttctgcgccctgccccgctcggaggcattggcctccaccgggtactggtcgccatacccttccacctggatgcgtttttcgtcgatccccaggtcgaccagcacatcagccaccgactgcgcgcggtcgcgggacagtttgaggttttcctgctcgccgccggtgttatcggcgtagccctcgatacgcaccacacgcttggggttcagttgcaagaactgcacgatcttgagcactgtgcggttggccgagttcttcagctcggcgtcaccggtgtcgaacagcacatcgcccagggtcatcaccaggccacgatcggtctgggtggtggtcaggctggcgatctgctcttcaagccatttaccctgctgctgcacgctgctcagcttgctttcacgcagcgccagctgcaggcgctggcgctccagttcgagcttggcgccgcgctcctggttgagcgcctgttcggtgtgttcgcgggcaatcgcgctatagcgctggctcaagtaggcgtaatgcaccacgtcggcaccgctgccccagtagctggacaggcgatcggcacgggccagggactcaccggcgcggatcacgtccttgggcgcaaagcgcaacacattggcgtcttccttgaccttctggaagtcattcccggcctgttgcagggcctgttcgctgtcgggatggctggcacaaccgcccaatacagcagtgcccaacagcagcgcacagcccaaaccacggatcatcggactcattgggcttcccccaactgcaattgcttgcgcaggcgagtgatgcgggtgttgagcacgttcaactgctcctggctcttgcgggtcaacactttggcttccgccagacgcgcgtccaactcggcttgctcaaagcgcatgcgtgcatttttgtaggactggtcagccatgctcgacttggcccgggcgaatttctcttcggccagtttcagttcgggcgattcatcggggttggcgccaacagcgctggcttgctccagggcttgctgggtgaggcgaatttgttcattcggcgcaggatcagctgcacatcccgccagagcgacaacggcgagggccgcgaaaagaggtcgaagagtcactgaaaatccctactttgttggggtgccgacgggttgttgcaattgcgctttccaacgttccagattgcgctgcaatgcggcttccgtcacaccagacccgggcaattctgtcatctttttggcgagctgtccgcgcaaccacggatcgttgcaggccgagttgtgggaaatcgccaggtacaggcccggctgatcgacgggcacgtcgcgggtgatcaggtcgttgctcatgcccaaggtctgtgccattgccatgccggaataacgcccggcgaggacatagtcgacctctcccagcagcagcttctgaaacgccggcgtcagggacggcaggcgttgcaggctcaattgctggccggcgaacgtttcgaaggcggcactcaaacgcgcacgttccgacaccgcgcctttgtgcccgtgcaggtcggccgccgtggtgtaggccagcgctgaatccttgcgcgtccacactaggtagtcgagctgcaccagggccgggtggatgtagtcgagggtttccagctcgcccaggttcagcggcgcatcggcaaggatatccatgcgcccgctgcgcacctcatccagggccagcgaacgtttgccgccgtagagcaggtcgattttcaacccgaggtccttgcccacttgttgcagcacgtcggcggtggcgccgatgaggtgcgtggggtcttgcgggtcacgccagagcaggggcggcgcgtccggactgccggtgatcaccaggcggtcgcatttgccggcggccagcgtcaggctcggcagcagagtgaggcccagcagtacggcccagggacgcagttccatggcaagtgtctccagcaagtcaaaaaaaagcccggtcacatggaccgggctctttataagtgaagcgactggattagaccagcttctccaactcagggacagcttcgaacaagtccgccaccaggccgtaatcagccacctggaagatcggtgcttcttcgtccttgttgatcgcaacgatcaccttggagtctttcataccggccaagtgctggatcgcgccggagataccgacggcgatgtacagctgtggcgcaacgatcttgccggtctggccgacctgcatgtcgttgggtacgaaacctgcgtcgacggccgcgcgggaggcgccgaccgcagcgcccagcttgtcggccagggcatacaggtgcttgaagttgtcaccgttctgcatgccacggccgccggaaacgacgatcttggcagcggtcagctcaggacggtccgacttggccagctcttcgccaacaaagctggaagtgccagcgtcgtgggcagcggcgacggcttcaacggcagccgaaccaccttcagcggcaaccgggtcgaaaccggtggcgcgtacggtgatgactttgaccgaagcgttggactgtacggtagcgatagcgttgccggcatagatcgggcgcttgaaggtgtcggcgctttcgaccgagatgatctcggagatctggtcaacgtccagctgcgcggcaacgcgtggcaggatgtttttgccgttggaagtagcggcagccaggatgtggctgtagccagcgcccagttctgcaaccagaggggcaacgttttccggcaactggtgagcgtaagcggcgttgtcggccagtagtactttgctcacgcccgcgattttcgcagcggcttcagccacggcgccagcgccttggccagcaaccaatacgtggatatcaccaccgattttcgcagcggcagccacggtgttcagggtggccggggccagcaccttgttgtcgtgttcagcgattaccaagatagtcatgattagattaccttcgcttcgtttttcagtttctctaccagttcagctaccgacttgaccttgatgcccgcgctgcgtgcagccggtgcttcaactttcacggtcttgttggtagaggcggtggaaacgcccaaagcttccggagtcaacgactcaagcggcttcttcttggctttcatgatgtttggcagggacgcgtagcgcggctcgttcaaacgcaggtcggtggtgacgatggccggcagtttcaaagaaacggtctgcgcgccgccgtcgatttcacgggtgacagcaacgctgtcgccgctcacttcgaccttggaggcgaaggtgccctggccgtaaccggtcagcgcagccagcatctggccagtctggttgttgtcgctgtcgatggcctgtttgccgaggatcaccagctggggctgttccttgtcgacaacggctttgagcagcttggcaacggccagggaggtcagctcttcagcggactcgaccaggatggcgcggtcggcgcccagtgccagggcggtacgcagctgctcttgagcagtggtcgggccgatggaaaccacgacgatttcagtcgccacgcctttctctttcaggcgtacggcttcttccacggcgatttcgcagaaagggttcatcgacatcttgacgttagcgaggtcgacgccggaattgtccgccttgacgcgaactttcacgttgtaatcgacaacgcgtttgacagctacaagaaccttcatggattcctcgttactctccggtgaaaagaaagtcgcctaggcgaacctggcggttgatgctcatcggcacacaagggcacctccaaaaacgcaggcggcgaccttgctcacgggaaatgatgaccgttcgtcaggggtgactgagaggtcattctttatcgcagcgtgtaaactgcgcgccagtgtttgggcacgcgtcacctgtcttgcttttggacgtgctcttgaaacctgctgtctgcctacggtaagcgcaaaaccgaccgtatattgaccggaacgcctattctggtcaatacggcaaaatagccagtcataagccgcaccactttgatttatctagcctgcgagcaattcaaacaaacgtttgtattggacgctgccagtggtgtagatataatgcgccacctagagagaaaggtgggtcttgccgttgccgtaagacgacaccgaacctccacccattagaaaaaaaagcctgttgagccttgagtaggagatagcctgtggaacgcgaatacatggaattcgacgtggtcatcgtcggcgctggcccggcgggactgtctgccgcctgccgactgaagcagaaggccgccgaagccggtaaggaaatcagcgtctgcgtggtcgagaaaggctccgaagtcggcgcgcatatcctctccggtgccgtgttcgaaccacgcgccctgaacgaactgttcccggactggaaagaactcggtgccccgctcaataccccagtggtgcgcgacgacatctatgtactgcgcagccccgaagcctccaccaaggtgcctgacttttttgtgcccaagaccatgcacaatgaaggcaactacatcatctccctgggcaacctgtgccgctggctggcccagcaggccgagaacctgggcgtggaagtctacccaggcttcgccgcccaggaagcgctgttcgacgaaaacggcgtggtgcgcgggatcatcaccggtgacctcggcgtcgaccgcgaaggcaatcccaaagaaggcgtctacaccccaggcatggaactgcgtggcaagtacacgctgttcgccgaaggttgccgtggccatatcggcaagcagctgatccagcgcttcaacctggacagcgacgccgacgcccagcactacggcatcggcctgaaggaaatctgggaaatcgacccggccaaacatcagcctggcctggtggtgcacaccgccggttggccgctggacatcatgagcaacgagaacactggtggctcgttcctctatcacctggaaaacaaccaggtcgttgtgggcctgatcgtcgacctgtcctacagcaacactttcctgtcgccgttcgatgagttccagcgcctcaagcaccacccggtgctggcccagtacctcgaaggcggcaagcgcatcagctacggcgcgcgtgccatctgcaaaggcggcctgaactcgctgccgaagatggtcttcaagggcggcgcgctgatcggttgcgacctcggcaccctgaacttcgccaagatcaagggcagccacaccgcgatgaagtccggcatgctcgccgccgacgccgtggccgaccgcctgttcgctgactccgaaggcggtgacgaactgaccgcttacgtcgacagcttcaagtccagctggctctacgaagaactgttcgccagccgtaacttcggcccggcgatgcacaagttcggcccgatcatcggtgccggcttcaactggttcgaccagaacatcctgggcggcaagatgccgttcaccctgcacgacaccaagccggactacgcctgcctcaagctggccaaggacagcaagaagatcgactacccgaaacccgacggcaagctgagcttcgacaagctgagctcggtattcatctccggcaccaaccatgaagaagaacagccgtgccacttgaagctgaaagacgcgagcatcccgatcggcaccaacctgccgctctacgatgaaccggcgcagcgctactgcccggccggcgtgtatgaagtgatcacccaggaagacggcgaaaagcgcttccagatcaacgcccagaactgcgtgcactgcaagacctgtgacatcaaggacccttcgcagaacatcacctgggttacgccggaaggcgcgggtgggccgacttacccgaatatgtaagctcgcgactcgaacaaaaaggctcccaaatgggagccttttttatgctgcgcgctcttcgccgggattgcgcaggaagtagcgcttgtactcgcgactgaactgcgacgtactctggtaccccacgctgtgcgccgcctgcgccacacccataccgtccaccagcagcaactgttgggccttgagcagacgcagacgcttgaggtactgcaccggcgacaacaacgtgcagcgcttgaagtgctcatgaaaggtcgacgcactcatgtgcgcatacccggccagcgtctcgatattcagcggctcggcatagtgggcatgcaggtgattcaatgacgtggcgatccgcgaaaactgcccctgctgttccaccagtgctcgcaacacatcggcctgcgggccccgcagagcggtgaacaacacttcccggacccgcgccgcgcccatgatccggctttccagcggatcgtgcaggcattgcaacagccgctcgacagcaccgcgcattgcgtcatcgagcatcaccgaactcatcgactccagcgtctgcgccgtgggtggcggcccggcctgaatgcccatggccatgaccaattcgcccaggaccacgcggtcaatgcccaccgtgacaccgtacaacggcgcatcagcgcccatggcaaaggtctcgcactcgaacggcaccggcatggcctggatcaggtaatgcccggcgccatactccaacgtgcgcggccccaggtaggcgactttgctgccttgggccacgaacatcaggcttggctcatagatctgcggcccgcgtgccacgtcacaactggcgcgcagcacttgcacaccgggcaggtgggtcggggaaaaaccgtcgcagggcgtaagcccctcaatcaaggcaaccaaggtggcattggcatcgagatggcgggtcaacaacatggcaaaaaacttcgcgaataagggatgagaacatcatcgcaggtctggcggccaatggatccaaaccaggggcactcccggacgaataggcatgagactcggagcaatcgccatggccgcatcaggacccggcgcggagaatgcgccgcctcacctgtcattgcttttgcgaggtttccccatgtacaccgccatcggttatgccgcccagtcggccaccactcccctcgcccccatgtctttccagcgccgcagcccgcgcgccgatgacgtggccatcgagatcctctactgcggcgtctgccactccgacatccaccaggcgcgcaacgaatggggcatcgccgtgtacccgctgatgccgggccacgagattgtcggcaaggtcaccgccgttggcgccaacgtcaccgcgcacaaaattggcgacctggtcggcgtgggctgcatggtcgattcgtgccgtcactgcgacgcctgcaagtcagaccttgagcaatactgcctcgaaggcccgaccatgacctacgccaccccggaccgtgtagacggcagcaacaccatgggcggttactccgacagcatcgtggtcagcgagcacttcgtggtgaagatcccggccaagctcgatctggccagcgcggcgccgatcctgtgcgccggcattaccacctactcgccgctcaagcactacggcgtgaaggccggcgataaagtcggcgtgctgggcatgggtggcctgggccatatgggcatcaagttcgccaaggccatgggcgcggaagtgacgctgttcacccgctcggcgagcaaggccgaggaaggtcgtcgccagggtgccgaccatgtaatcgtgtccaccgatgccgagcagatgaaagccgccgccggccgtttcgacttcctgctggacaccatcccggtgcagcacgacctgaacccctacctcgacgtgctgcgctttgacggcgtgcatatcctggtcggcctgatcgagccggtcgacccgcccgtcaacgccgccaagctggtgctgggccgcaaagtgctggccggttccttgatcggcggcattgccgaaacccaggaagtcctggatttctgcgccgagcacaacatcacctgcgacatcgaaatgctcgacatccgccatatcaacgaagcctacagccgcatgatcgccggcgatgtgaagtaccgttttgtcatcgacatgacgaccttgaaggcctgatcaggccttcgcgcccaactccgccgacagccgggctgcgacctgtttgaccacgggaatcagctcggccattttctccaagggcatgtagggcacggtactggcgatgctgatgccggcgacgatgcgccggctggcatcgcgcaccggggccgccacgcaacggatcgacggttcgttgtcttccaggtcgaacgcatacccgcccaccacgtattcacgcatgcgctgctcgaactgcgcccaggactgttccgggtgctgcggccactgcaggcttttcccgcccaccggcaggctgacgtcgtacagacgctgccactcttccaccgtgtcatccagcagcaatgccttgccaattccggtgcgcgccagcggcatgcggtggccgactcgcgagcgcatttccgggccattgcggccggggttcttgtgcaggtaaagcacgtcatcgtattcgcgaatggccaggtggatggtgtcaccggtcaatgccgacagctcatccagatacgggatagccaaggtcaccagcggcagctcttcccgcgcctgaaaccccagctcgatcaacttcggccccagcaggtaaccgacttgcggcactacgcgcaggtaacgctcgtccaccaggcaactggccaggcggtgggtggtgctgcgggtggtgccgatgcgcttggcgatctctttcagatcccgcgcacccgccgccacggcctgcaccacgcccaggccgcgcagcagggtctgggtgccggtgggggcggtgtctttgacgggggtgtgggcgttttcctgcatatcaggcctatgtggtggtacgaaaacgagcggcattatggcaaaagctgaacctcaatacagcgcagatccaaatgtgggagggggcttgcccccgatagcggtgtgtcagtgaatgcatgtttttctgacgtgccgccatcgggggcaagccccctcccacatttgaatcttcatagggctcgggatcagcgctgtttcatgcggtcaatgatgaccgccagcaacaggatcgagccacggatgacgtattggtagaaggtgtcgatgttcttcaggttcatcgcattctcgatgatcgccaaaatcaacaccccggcaatcacatggcggatcatgccgatgccgccactcaacgacaccccgcccaacacgcacgccgagatcaccgtcagctcaaagccctgcccaatcatcggctggcccgaggtcatgcgcgaggcgaggatcaccccggccaacgcaccgatcaacccgtgcacggcaaagatgatgatcttggtgcgatcgacgttcaccccggccagcaacgccgcttcctggttaccgccgatggccatggtgttgcgcccgtaggtggtgtagttgagcagccagccgaaaaacacaaagcacagcacggtgatgatgatcggcaccggcacgcccatcaactggccgttgccgaacacgaagaaaccctcatccatcacccccaccgctttgccgttggagaagatgtaggccaggccgcgcacgatctgcatggttgccaacgtcgcgatcaaggcgttgatacgcagcttggcgatgacaataccgttgatcagccccaccaccaggcccatggccaacgccgccgacacaccgagcaccacgctgtcggtatcacggatcacgatacctgcgaccaccccggcacacgcaatcaccgagcccaccgacaagtcgaaatgcccggatgccaggcagaacaacatggtgcacgcggcgatgcccacggtggagatcgccaggcccagcccgcgcatgttcagcggtgaaaggaagttgtcgataaacaacgcgctgagcacaaagatgctcaacgcggcgagcagcatcacccagtcatcgaggaatttgcgctggttgaaacccggccagaagccctttgcagtttttacctcagacatcattcacctcgaattcttcaagcccgcgaacgcgggagagccagttgcaacagccgtgcttcatccgcctggtcacgggcgagttcgccggtcagggcgccttcgctcatcaccaggatgcggtcggaaatccccatcacttccatcaggtcgctggacaccacaatcaccgcaataccgctggccgccaggttatggatgatctggtagatctccgacttggcaccaatatcgatgccacgcgttggctcatccagcagcagtactttcatcggcatcgacaaccagcggccgagaatggccttctgctggttgccgccggacaggtacatgattttctgttcggcgttcggcgtcttgaccttcatgcttttgatttgccggtctgcgttggccttttcccagccatcacgcagcagccagccaaatgcagagtgggcgccacgcgcgctgatattgatattttcggcgacgctggacagcggaatgatgccttccttcttgcggtcttccgggcacagcagtacgccggcggcgatggcatcgcgcggtgaacgcagttgcagggcctgaccgcacagttccaggctgccggcagtgctgcgggtcaaaccactcagcagccgaaacagctccgtgcgccctgccccgaccaagccgaacaggccgagaatctcgcccttgtgtacctgaaggctgaccggctcacgcaagcccgggccaagcaagccctcgaccttcagcgctacatcgccctgttcacgtgggcggtagtcgtagatgtcctggatatcgcggccgaccatgcacgttaccaactggtcgtgggtcagggtgctcatgtcgtcgaaggtgcgcacgtaacggccgtccttgaacaccgttaccgcgttgcagatgcggaacacttcctccatgcgatgggacacgtagagcaccactttgccttcatcgcgcagccgcgtgatgatcgccatcaagcgatcgatctcccgcgccgacaggctgctggtgggctcgtcgaaggcaatcacatgggcgccacgggacagcgccttggcgatttccaccagttggcgttgaccaagggaaagtcgaccgagcttctcatccggatcgatttcatccgccaggcccttgaggcaggccaacgcctgcttacgcaactgactgcggttgaccaccccgaagcgcgtcggcaagtgcccaaggaacaggttctcggccacggtcatttccggcaccaagtgcagctcctggtggatcaccgccacgccgttggcaatgctgtcggcggcagacttgaagtccatggtctgcgcgccgatctgcaacgtgccactgctgggcaggtaggcgccgccaaggattttcagcagcgtcgacttgcccgcgccgttctcgcccatcaacgcatgcacctcacgcggccgcgcttcaaagctgatctgcgccagggctttcacaccgggaaactccttgccgatgccgttgaagcgcaaggccgcgccggtcatttccacaacccgatcttggtcagctctgcctggaagttggcgcgggtgatcagggtcacttcgtccatcgccgtgtatttcgcaggttccttgccggtggtgacccactcatacatcgccaacgcggtgttgtaaccctcgatatgcgggctgggcagcatcgagccgaagaaaccgctttcagcctttttcaactcgccgatggcgtcggtgccattgatgccgatgccgatcacattggcagccttgaagccggcgctttcggtggcgcgtacgccgccgagcacggtgttgtcattcatgccgccgatgatcaggtttttcgcgccgctgggcagcttgaccagcgccgagttggtggcgtccatgctgccgggtacgtcaagggtcttgagcgcggcggtcaggatatggtctttgggcaggccggcgtcttccagggacttgatcgaaccgtcggtgcgcttcttgccggtgtcgagttcgttataggtgttgatcacggcgtaggtgtccttccagtcccagccgcgttttttcgcttcggttgccattgcggcgccctgcttctggcccacttcaaaggcagccatgcccaggtacggcacgtcttccatgaagttgcccttcgcatccacgaagcgatcatccactgccatgactttcaggccattgaccttggccttggcgacgatggccgggccgagggacacgtccggcgggcagatcacaaagcccttggcgccgttggcagccaggctgtcgatggccgagagggttttttcaccgtcgggcacggcgatcttgatcacggtaaagccgtgttccttgccggctttctcggcgaaggcccattcggtctggaaccagggttcttcggcctgtttgaccagaaagccgatcttcacttcttcggcgagtgccacgctgctgaacgccattgcaagtgccagggtgcctaaagtcttcttgaacatgaaccacctctttcttgttattggaaaacgcttcagtcgtggtacatcactgaccgcccgccatcgatcatcaggcaggttgcattgataaacggcgcctcgtcggtcgccaggaacaacgcggtcatcgccacttcgatcggctggccgatgcgcttgggcgggtgcaggtcgaacgcacgctggcgttcggcgtgggggtcggggaaaccgttccagtagtcgacgttgagctgggtttctatgtagcccggcgcgatggcattcacgcggatgcccttgggcgcgtattcgatgccgagggcgcgggtcaggccaagcaggccatgcttggccacgggataggggaagcagccaggaatgatgtggctggaatgggtggaagcaatgttgatgatattgccgatgccctgctcgatcatgtgcggcagcaccgtgcggcagccgtaccaggcaccgtcgaggtcgatggcgaagcagcggcgccagtcttcgtcggtcatctccagcgggtcgcgaaacacattgaccccggcgcaattgaccagcacatccacccggccgaagcgctcgatggccacattgaccagtgcctgccattgttccttggacgtgatatcgacggattgcgcgtagatcttggcgccgtgttcgcgccagcgggccgcgacctgctcgaccttttcgccctggatatcagcgatgatcagcttcgcctgctgcgcctggaaacacgcgacgatcgcctcgccaatgccttgggcggcaccggtgatgatcaccactttgcctttgagccgctcgccgtaggtgggttcgggcacggcggggagtgacaacggttgtgcctgcatcgcttcacctgttttatttttggtagtgagtgctgatgcagccgactataaacccatcttttgaaacatctcaatatataaatttgcatcccatatattgagaaaagagcaaaaaaattgtgggagggggcaagccccctcccacattttgatctacggtctttagcctagggcgaagtcacgcagcgcatcaccttccatgcgatagcgcacccactcctcctgcggctgggcaccgatggatttgtagaacgcaatcgccggttcgttccagtccagcacgctccactcgaagcgcccgcagccgttgtcgaacgcgatcttcgctaggtggcgcaagagcttcttgcccgcgccgccgccgcgttgctccgggttgatgtacaggtcttccaggtacaggcagttgctgcccagccaagtggaataactgaagaagaacaccgcaaaaccaatcggcaggccatcgcgcaaacagatcaggccatgggcggtcgccccttcgctgaacaggctacgctcgatgtccaccacactggcgatcacttcatgccgggccttctcgtactcggccaactcagtgatgaaagtcaggatctgcgcagcatcgctgggcacggcggggcgaatctcgatggtcatgggcgagccttggcaatttcaaagcacacatactaaggcgctttcgtgacgagttgcagcgcaattcgtggtcactggcacacaaaatcttacaggtgacgcaagaccgttcgtcgccacccaggcacgaacatcaaacgagagctgaccaacagtaggtaaggacattcatcatatggagacaccctcatgaagcattccaagtttgctgccctcgccctggctggcctgttgtcttcggtttcgctgagcggttttgcggccacctcctccaccggcccgaccaacccggacgccaccaccgagtcccagaaatccatgggcaccggcctggacaccaatggcggcgcagtcattgacaataccaatgccgctgacccgcacacccagggccatgacacccaacgccaggcaccagctgccgtcggcaacggcaaaatgggcccatcggtcaatgaacccaagatcaacaagggcgatgactcgaacctgcccggcgcgccaaaacagcctgcgccttgatccacccaacgcaagacgaacacccgatcatttcccagtgaagaggtacgcatgaacgtcgacaaagaccttgagaaagaagtcttgacccgcctgctgcacgctcatccccaggggctgggcaaggaggtgttggataactaccgcggagaaaaagtcgtcgccagtgcgttggcgtttctgcaggatcgcggcctgatcaaggatgggcatgtgaccaccgacgccgccggtgaatatgcgttgaacctgccgatcaagctgacggcgtcgggtgtggatgaggcgcgtaagttggagtctgaaaccagccagtagcctcaaatgtgggagggggctttcccgctcccacattttttgacacggcctattcccggagaaaggcgtcgacttctgcgctgccaggcgatgtagccggcccccagcgagtcaccgccagcgccgctgccgcgttcgcccggcgtgcagcctgggcaggtgccaggccatcggccaaccctgcgataaacaccccggcatgggcatccccagcgccattgctgtccaccgccgtcaccttcaaccccggcacatgctcggcctggccattgcggctcacccagcagccattcggcccatcccgcaccaccagcaaggcatcgccgggcagatgacgattcaagtcgaccagcgcctctgcaaccgtttccgccccggtaaacgccagtgcttcagggccattactggtccagatatcgatacgcggcaacagcgccaccatcagcgccgaatccggtgccttcaccaacggacccgggtcgaacaccaccttgatagcgcgaggcagcgccagcaaccagtcgagcagagcctgcgccttgccttccagcaacaggctgtagccactcacatacacgtaatcgtccggctgcgggaccacgcgcgccaggtcctcggcgctcaactcgccttcagcaccgatatgggaaatgaaggtgcgttcggtggtggcctcggtcagcgacacacacaaaccggtatctttatccgtgctggccgcttgggcaatctcgacaccttccgcctgcatcgccgcgcgtgccaggtcgccgaaacgcccgttgccgtgacggcccaggtagaccaccgccagcccattgcgccgtgcggccgccatcacattgaagccaccgccggcttcgaaactggccgattgcgccagcacgtcgccaccggttgcgggcaaggtatcgagggccatgaccaggtcgacgatgacctggccggtgtgcagcaatctagacattagggctctctactaaagccgggcgacgatcagccgcaccgcccagtactgcataaatcccgccggccaccagaaaggtgacgatccagcccaggccgttgtggcccagccaggagtcggacaaaggcccggcgaaccagatgttctcggcggtggtgccgatggcggtgaagctgaaacccagcacgatcgccacggcccaggcaccgaaggcacgccactccacaccgccgcgataccagtaggcgctgcttgggctcacgtccagcaggtccttggcgctgtagtagtgacggtggatcaggtcgaccacgaagatgccgacccatgccgtgatcggcaccgccagcaaagaaatgaacgtgatgaacgggccgtagaaactgtcggcgatcagcatgaagtaaatcgaaccggcgaagatcgccacgatatcgacgatcaccgcatgcacgcgcttgaccttcaaaccgagggtcagggtggtgaggcccgccgagtacaccgataggttgttggacagcagtaacccgccgaacgcggtgatcaggtacggcacggccatccaggtcggcaacatatcgcggatcgcgatgatcgggtcggtcgccgacgccaggtcattgttgcccaccgacagcaggccgccgagggtgatcaacagcaccagcggaatgcccgcaccgaacgccgccgacgccaccaggcgcacggccttgacgctgcggtgctggtagcgcgacatatccgcgccggcgttggcccagccgataccggtgccggccgccatggtgccgacgccgatgatcatcgcgctcagcggtgccggggtggcgttgaacaccgcgctccaatcgatggtggcgcagaggaaaccgccgaccaggatgttcaacgcgccgaacacataggtggcccacttctggatcaccagcaaggtggcgtggcccaggccggacaccgacaaggtcaacagcacgaagatggcgatgaagaccagggtgagcaccggcgcgcttttggcttcgaccggcgaaccgaacaggatcgagcacaacgacagcagcacaaaggcggcggtagtggtgttgacggtttcccagcccaggcgcgacatcagcgacaccagggtcggcccgatattgccgcgcacgccgaagatggcgcgggacagggtcaggctgggcgcacggccacgacggccggcgatagaaatgatgcccaccaccgcaaaggagccggcggcgccgaggatcgcaacgatgatggcctgccagatcgccaggccgcgaaacgcgaccagggtggcgccgagcggcaagccgaggatgctgatattggccgcgaaccacacccagaacagttgcagcgggtggccattgcactcgccttcaggaaccggttcgatgccgcgtgtttccaattgcccggcgctttggccggaagatgtgctgctcatgagagggtgctccaagtgcctgtattgttgtggttgtggcaggtatacaaagcgaatcttccggtcgtcctgactcagcgcattttcaacaattcttcaaccagcgactgcagatccaggccattgacctgcttgacctgttcgatcagcgcctcaggccagcactgcatgcccaggcacgcaccgagcatggcgccgagaatcgcggcgatggtgtcagtgtcaccgccaagactggccgccaggcacagcgcctcgaaagcactcatctcgcccaccgccacttgctgggccagggcgaacgacaccaccaccgactcctgggacgcgacggaggtgccgatcaattcgtacagcaggtcggcgaacagggccttgtcgccgctgccgacgctcaaggtccgcgcccagctgatgcgcgtggacatccgcccacccgcgatccagtgaccatggccttcggcctgctgggcaacctgggtgccgatgttcaacgcttcgcccaggtccacaccgttgattccggctgataccaccgccgccaccgccgccgcgctggaaatacccagggtggtgttatgggtgacctggcaggcctggattaccgcctggataaactgcgccgggtcgctgacatcggcggcaatccccactggcgtgatgcgcatcgcggcgccgttggtggtgccgtaacgtccggattcttccggggtgtggccggcgaggatcatgtcgatcgcacgcttggtggaggggccgagcaaatcctgggaacccttggcgcgcatcaccgcttcccagtcgatcaggcgctgggcaagcacagtgggttcgatcttgcctcggccttgcacgagtaactcacccaccaggatggcctgttcggtgtcatcggtgatggagccggcgggcatgttaggtgcgatgggctggtcggcgtcggcgtgttccaggccggtgatggcaccgaaacgcgcgcgcacctgttcgcggctcagggactgggtcggcatgcccagggcatcgcccaaggccaagccgtagaaggcgccgagggcgcgattgagcggggtcatttcgagtttccaaattgcaggtgcaggcgaaagtgcagaggatcgagcaagctttcgacgtactccatgaaacgctcgcgacggtcgtaggtggtgcgcgaggccttgaggaacaccgtgccggctgggcggccaagcaactcggcatcttcatcgctgaggggctctgcaccgatccattggtcgccttcggcgccgacataaccgtaggcagccagggtaatggtcagggaatcatcgatcaggccgactctcggcaggccctccaggcctccggaagcgggcatcagcgagcgttccagggacacggcagtgccgtcagtggtgcgacggcgacggtcgagggcaatgaattggtcgctgccaaaacggctgaacaggtccgggcgggtcaccgcttccaggcgcaggatatcggtgttgaccttcgcaccggtgtccgccagggcttgggcccagccactgcgctggtcgagcaccatgccgtcaaaagtgacgatggagccgacgccgctctgggtcgcaatgtagttacgccgcttgagttcagcgagggcctcacgcagggtgccgcggctgaccgcgaactcttcggccaactgatgctcgcccggcagcaggaaaccgtcggccatcaccccaccctcgatacggcggatgagttcgtcgacgacgcgttttttcttatcaaatcgaacatgtctaatcatgtacaaattgataacgcaaagcgcccatgtgcagcaagcgaattatttcagggagatgataaaaccggcctcagggctccaggccaatagggaaaaactcccctgcgctccagacgcccagccagttctgaccgttgatcggacggctcactgccaactccaccaattggtagaacgcattgcggtgcaccagggcttcgaggttgctgcgcactcgcagatagggagcaggctcctgggtcacagggtcgatcaccacccgcagcgggtgttcgaggccggcttcgacctggtcatcgacattggtggtgaagcgcagcacctggctttcgccctgcccttcgacttccagggtaatggcgacaaacggcgcatcatcgacggtgatgccgactttttctacaggcgtaatcaggaagtaatcatcgccgtcgcggcggatgatgttggagaacagcttgaccatcggcatgcgcccgatcggcgtgccctggtagaaccaggtgccatcacgggcgatgcgcatgtcgatgttgccgcagaagtccgggttccacaggtgcaccggcgccggtcccttgcctttgggcagttgggccaacaggtcgttggccttggcggaatcggtcatggggttctcctgggtcttatggattgctcatccccaacaggccacgggcgtactgcgccagggggcgggcaatcaggtcttgtggcttgttgtcgtgaaacgtcagtaaaccgccacgactgcgtatacgtgcagtatcaatcaaatactgggtgctggtctcgatcaacatgatctggatgacgccgctgtccaggcctacgcggtcgagggcttcctggtcggcccattcatccgcgttgccgatgcggtcatccgccttggcgaaacggcagtacagcaggtagtgagcccccgccgcacgggcttcggccatggcctgctccagtccttcgggttgacgggcgcggcgcaccatggggaagtactcgacaaaaccattgaaggcttcttcggccaccacgttcggccgcggataggcactgcccggcggcacaaaggcgccctgggcgataaagacgaaggagtccggctgtatgcgtaccgaggcggtacggcgggtatcgctgtggtcgagcaaaccggcgtcgctcatctgatagcgggtgccttcggccatatcgctgacggtcatgcagccactcagcgtcaacgacgccagcaacaaaaccagactacgcatcctaatcctccagaagccggtgacggaaaaccggcgaatgggcgtgtgatgcaggttctgcgccatttggtagcaacctacaacaaatgtgggagggggcttgcccccgatannnnnnnnnnnnnnnnnnnnnnnnnnnnnnnnnnnnnnntatcgggggcaagccccctcccacatttggttttgtgctgtctgagcgggttggttagccgccgatgatcttcatgatggttgcaccgcccgagaaggccacttcctgtttgtcgcccagggctttcatcaacaggccttgcaacgccggcagcgcttgatggcgcggcttgtccagcaggtcgccgacgtagtggcggttactcgacgacaggcagccatgcagccagccagtggacgacaagcgcaaccgcgagcaggtgcggcagaacggcacgctttcgttggcgatcacaccaaagaaacccttgcccggcacttcgtagcgtacggccgtggcgtccacgggggcgttggcttgcaggtattcatactgttcgccgatcaggcccagcagttgttgcaggctgacaaactgctgcaggaaggcgttggagtccttggccaagtggcccatgcgcatcaactcgataaagcgcaactcgtagccacgctccaggcagtagtcgagcagcggcatgacctggtcgaggttctggccgcgtaacggcaccatattgaccttgatcttgatcccggcagcgcgggcctggtccatgccgtcaagcaccgtggccaggtcgccaccacgggcgatactacggaaggcatccgcatccagggtgtcgagggacacgttgatgcgcttgatcccggcttccaccagcagcggcagcttgcgcgccagcagttggccgttggtggtcaggctgatatcgctgagacccatcccccccacggcgcccatgaaagcttccagcttggggctgaccagcggctcaccgccggtgatgcgcaggcggtcgatgcccgccgcttcgatcaggtattccacaccacgggccatagcctcggccgagagttcgtcctgggcagccaccagccgcttgccgttgggcacgcagtaggtacacgcgtaattgcaggctgaggtcaggctgatccgcaaattgcgaaaacgcctgccttgacgatcaacgatcatggatcactccggcagaggatgaatcgggcgcgctaaaagctgactgataaatcagcttttagcaagcgtccttgcctgagtatattcctggggtactgcgcgtggcagcaaatcattacgtggcaggcgtttgggccggcgccgcttcaatcgccggcggctcactgctgtgcttgcgcttgttgcccatgcgcacgccgatatccatcaaaaactggaagaaaccttcctgatcttccagcacgttgctccagaacggcgagtggtacagcgccacggcaccgtgcaccagggcccaggcggcgcagtagtggaaatacggcggcacatcttcaagcttgccttcactgatacggcccttgatcagcagggtcaggcgttcgaagttcgaggcgcggatcttgtgcagttcctcgaccatctccggcacctgatggcccttgaccaccttctcttccagccggtcgaacaggcgatagcgctgcgggtcacgcatgcggaactcgaagtaggcacgggacagggcttccttgtccttgtcgacgtcggccgaatgcagcagctcgttcaagtcgcgctcgtagtcgagcataaggcgcaggtagatctcggccttggacttgaagtgcttgtagatcgtgcctttgccgatacccacggcatccgcgatcatctcgacggtgacgctgtcttcaccttgttcaagaaacagcttgagtgcggtgtcgagaatttcctgctcacggcggcgaaactcacggaccttacggggttctttgtgcatgaggaagaggtctgcaaaggtcggattagggagggttgcgcagggccacggatacgtggcgatacgatttacccggtgcgagggattatcccgactgaacggtcgttgggcaatgtctatgtgaacccgtaacgcactttactttcagcgcgccaacgttttcattgatatcagtcagaaataatacgcaacaactacacccgtacaccggactgatgagaactcaagcgaagcgcgcgtattccaaatctgtttaaaaaacgatcagtcgcgactggactgaatcggatactgatcaatacttgaactgtcggcgtgacatctcccccaagtgaagcgccgacctgggtaccaacggaccgcgtacccttgttttactcctaatggtcttaacccggattcaccccccagaacccgggttttttttgcctgcgatttgaccttcgcgttaagaggcgacgtgggccagcgggaacaggcgcttgaagttttcggtggtctgctcggcaaaacgctcgtaggactcaccgcgcagcatcgccaggtaatccgccacgtcgcgcacatactccggcaggttcggcttgccgcgatgggggataggcgccaggtacggcgaatcggtttccaccagcaggcgatcggcgggcacttggcgtgcgacatcacgcagggcgtcggcgttgcggaaggtgacgatacccgacagggaaatatagaaccccaggtccagcgccgccttggccatgtcccagtcttcagtgaagcaatgcaacacgccggcctggggcaatgctgcttcgcgtagcagggtcagggtgtcggcacgggcgccacgggtgtggacgatcaccggtttaccggtctgccgggcggcttgcaggtgcaggcggaacgaagcctgctgcaactcggcggcttcgggttcgtagtggtaatccaggccggtctcgccgatggccaccacgcgcgggtgattgagctcacccagcagccagtcgagtgccggggcttcaccgggcttgaggtccagcgggtggatacccaccgagcaatccacatcggcataacgctcggccagggctttgacgtccgccgcattctccgcgctgacgccgatgcacaggaagtgccctaccccacgctggcgggcggcgtcgagggcagcgtcaagggagccgccgtgctgggccaggtcgagacgatcaaggtggcagtgggaatctacaatcataggcatctacaacttcagtcacgaaaagtgtctggccgacgatacacccgccggccacggaaattaacggcgtccgagcaaaccgacccactgcaccagcaacgcttcgagcagcagcacgcggttgaggttggccttgccgagcaccttctggcgctgggcgaggatccagtcctgaatcgtcagcaccttgtcctgggcacttttctgcgccaggtattgcaccaccttgcgcatatccggcaggcccaggccgttttcatcctgggtcagctggtagcgcaagatcaggctcgaccaatcgcagaaccagtcgaacagcaacagcagggggatgtccttccaggcgttttctgccaactgggtggcggacacttcctgcttgatcagtttcttgaccccctccaccaccagcgcacgttgttcacgcacgccctgggcctgcagcttcacggcggccaacggcgaaccggcggccagggtcagcagctcgacccgttcctcctgggagcactccggcaacgcctgcgccagccacgcaaggctcatggcctcgcttggcagcgggcaggcctgctgcacgcagcggctgcggatggtgggcaacaaccggctcgattggtggctgaccaacaacagcacggtatcgccggacggctcctccaggcttttgagcaaggcgttggcagcattgacgttcatcgcctccaccggctcgatcagcaccaccttgcgcccgcccatctgtgcggtctgcaccacgaagctgaccaggtcgcgcacctggtcgaccttgattgccttgtcggcctcttcgggctccagcaggtagttatccgggtggctgccggccttgagcagcaggcaggatttgcactcgccgcaggcttcaagcttgaccgggcgctggcacagcaggctggccatcaggcgctcggccaacgctcgcttgccgatccccaccggcccatgcaataggtaggcgtgggcgtgctgggcacggccggccagttgttgccacaggctgtcctgccacgggtaggcttcagccacgggcgcgctccagcagtttgggtagcagcgcgtcgatggcttgctgcacctgcgccagcggttgggctgcatccagcagggaataccgcgcgggctcagccttggcccgtgtgaggaatgcactgcgtaccgcgttgaagaacccatcgccttccagttcgaagcggtccagacggccacgagcactggcgcgggccatgccgacttccaccggcagatcgaacagcagggtcaggtcagggcgcaagtcgccctggacaaaggtttccagggtggcgatgcgctccacggacaagccccgaccgccgccctggtaggcataggtggaatcggtgaaccgatcgcagatcaccacggcaccacgggccagggctggacggatcacctcggcaatgtgctgggcacgggcggcgaacaccagcagcagctcggtgtccgggttcatctgctcgtcacccggcgccagcagcacttcgcggatacgctcggccagcggcgtgccaccgggctcgcgggtcaacaccacctcgatgccttcgctgcgcaagcgctcggccagataatcgcggttggtgcttttgccggcgccttcggggccttccagggtaataaacaagccagtcacaggcagtccttagtcagaattattgcgggctttgcggcgcgggttcagctggcgtatcagcaggcacatccgccggtggtgttgcgtcttcggcaggcttcaccaccggcgccgggctggagcggtaatcggcgcgccgcttgagttggaactcacgcacggcggcattatgcgcatccaggttatcggagaaaatgtggctgccgtcgccacgggcgacgaaatacaggctgctgcccggcaccgggttcagcgcggcatggatcgcctcgcggccgaccatggcgatgggcgtcggcggcaggccggcaaccatgtaggtgttgtaggggttggcttccttgaggtgcgcgcgggtcaacttgccgttgtagcgctcgcccaggccgtagatcaccgtcgggtcggtctgcagcaacatgccgatcttcaggcgccgtacaaataccccggcaatctgcccacgctcttcaggcacgcctgtctctttctccaccagggaggccatgatcagcgcttggtaagggtcggtgtaaggcgcgtcggcagcgcgcttgctccactcctgggcgagcacgtcgtccaggcggttgtaggctttcttcaggaattcgacgtcggtcataccgcgcacgaaacggtaggtatcggggaagaaccgcccttctggaaacacgccagggtgaccgagcttctccatgacttcgctgtcactcaggcccgagagggtctgcacgatcttttcatgcttggccagcgccgagcgtacctggcggaagttccagccctcaaccagagtcaggctgtattgcaccacttcgccacgctgccacaggccgatcaggccctgcgccgtcatgccgggcgtcatgcggtattcgccgctgtgcaatggctggccgtccaggttgaagcgccagtacaggcgcaaccagaaggcaccgtccagtacgccgtcagcttccaggcgattgaaggtgccggtgggggtcgcccctgccggtacgtcgagcaattgctcctgggtcaggttcaagggctgcttcagggcagcgtcgtatttccaggcgccatagcccaacagcaaagccgccgagaacagaccgaccagcagcagtacaaccagttttcgtatcaactcagatttccaatagcgcgcgaacaatgccctgcagtttacgggtgagcgggccaaccgaccagctcatcgcagcgcactcgcgcaccggccaaatgccataaacgctgttacacacgaagacttcgtcggcttgctgcaactgctcaatactgatgtcggccacggccaccgggacgcccagggtctgtgcctgggccagaatctcggcacgcatcaccccggccacgccgcaacgcgtcagatcagcggttagtaacaagccattgcgcaccaggaacaggttgctgaatacgccttcgatcacgcgaccggacacatccagcatcaacccttcagcgtgctcggcgtcctgccattcggcacgggcgatcacctgttccaggcgattgaggtgcttgagaccggccagcaacggctgttcggccaagcgggtggcacagggaaacaggcggatgccatcggttccatgagcgctgggataagtagcaggcgggctgccctgcaagatacggcgcaccggtgcgccagggttgatgccataaccgcgcaggctgtcgccacgggtcaggatcaatttgaggacaccctcgccaagggcggtggcgtaggccagcacttcgctgcggatcaacaccggatccgcaaccaaggcgaggcgcctgcaaccctcgtcgaggcgttgcaggtgacggtcgagcagcaccggctgcccggcctttacggcgatggtctcgaacaacccatcgccatacgccaggccgcgatctttcaggggcacgctgtccgctggctgaccgtcgacccagctgtgcatcactcggcgaaccggcggaacaccagggaaccgttggtgccgccaaaaccgaacgaattggagatcaccacgtcgatcggcatcggctgcgcttcgtgtggcacgaagttcaggtcgcagccttcgtcaggctcatccaggttgatggtcggcggcgcgacctgatccttgatggccatcacactgaagatcgcctcgaccgcgcccgccgcacccaacaggtgaccggtcatggacttggtagagctgaccgccagcttgtaggcgtgctcgccgaataccgactttatggcctcggcttccgccagatcgcccgtcggagtcgaagtaccatgggcgttgatgtactgcacctggtccgcattgaccttcgcatcgcgcagggcgttggtgatgcaacgcgcagcaccggcaccgtcggacggcggcgaggtcatgtggtaggcgtcaccgctcatgccaaagccaatcagctcggcgtagatagtggcaccacgcgccttggcgtgttccaactcttccagcaccagggcgccggcaccgtcggagagtacaaagccatcacggcctttgtcccatggacggctggcgcgggtcggctcgtcgttacgcgtcgacagcgcacgggacgcgccgaagccgcccatgccgaggccgcacgccgccatctcggcgcccccggcgatcatcacgtcggcttcgtcataggcgatattgcgcgccgccatgccaatgcaatgcgtgccggtggtgcacgccgtggcgatggcgtagttaggtccctgtgcgcccaggtggatggacaggaaaccggaaatcatattgatgatcgagcccgggacgaagaacggtgaaattcgacgggggccggaatcgtgcaacgtgcggctggtttcttcgatattggtcaaaccgccaatacccgaacccatggccacgccgatacgatcacggttggcgtcggtgacttccaggccggcattgcgtaccgcctgaaaaccggctgccaggccgtattgaatgaacaggtcgagtttgcgggattccttgaccgagagatattcctcgacattgaaaccctttaccgagccgccaaaacgggtggaataggcagaaaggtccgtgtgttcgatcagaccaataccactgcggccagccagaatgccctgccaactgcttggcacatccgtgcccagtggcgacaacatacccataccggtgactacgacgcgtctacgcgacacagcactctcctttttctaatgacgacacttttgcttcagcgcgtacttttcatcagggctaaagaaaaaaccgcacgccgttacagcagtgcggtttttccctgacagcaagcgacgactacaaactattacgcctggtggctagtaacgtagtcgatagcagcttgaacagtagtgattttttcagcttcttcgtccgggatttcggtctcgaattcctcttccagagccatcaccagctcaacggtgtcaagggaatcggcacccaggtcttctacgaaggaagcagtgttgaccacttcttcttctttaacgcccagttgctcggcgacgattttcttgacgcgctcttcgatggtgctcataccttgtttaactcctaatggacaaattcaggcagctggccagtgggtaagtgtatagaaagccttttcagcttttcaactgaaagcttcaccctgtacccggtcggccacctgcctataaattaagttgcagctttataacggattttagacagctcgtatgacatatttttgaagcgatccgtcacaatttaactcatgtacatcccgccgttcaccgggattgtagccccagtcacgtatgccgcaccgtcggatgccaggaaagtgaccacattcgcgatctcttgagcctgacccagacggcccagcggaatctgcgtcagcaacgcttcacgctgtgcttccggcagttcgcgggtcatatcggtgtcgatgaacccaggggccaccgagttgaccgtaatcgaccgcgagccgacttcacgagccaatgcacggctgaaaccttccagaccggccttggcggctgcgtagtttacttggcctgcgttgcccatggcacccactacggagccaatattgataattcggccccaacgcgccttggtcatgccgcgcaaaacgcccttggacaggcgaaacagactgttcaagttggtgtcgaccacgtcgtaccactcgtcgtctttcatgcgcatcatcaggttgtcacgggtgatgccggcgttattcaccagaatcgccggcgcgccgaactgtgcggtgatctcggccagtacggcagccacggactcatcgctggtcacgttcagctcaaggccggtgccttgcacgccgttttccttcagggtcgcggcgatacgctcggcgcccgaggcggaagtggcggtgccgatcacaacggcgccctgacggcccagctccagggcgatcgcctggccaatgccacggcttgcgccggtgaccagtgcaactttaccttgcagactcatgcaggcttctcctacgttcagggattcaggccagtgccgcgcgagcggcagcaaaggcgtcaggggtattgaggttggcagtcgacacgccgtcggcgcagcgcttgttcaggccggccaggactttgcccggaccacactcaaccagctcagtcgcaccattggcggccagggtctggaccgattcaacccagcgtaccggcttgtagagctgttccagcaggtcgctcttgagggtatcgaggtcagcagccacggcggcgctgacgttctgcaccagcgggatctgcggcgcctgccagttgatggcggcgatggactcggcaaaacgctcggcagccgggcgcatcagctcgcagtgcgacggtacgctcaccggcaacggcaacgcgcgcttggcaccacgggccttgcagccttcgatggcacgctcaacggcagccttggcaccggcaatcaccacctggccaggggagttgaagtttaccgcgctgaccacttcgccctgggccgcttcggcacaggcctcgatcaccacagcgtcgtccaggcccaggattgcggccatgccgccctgcccggccggaacggcttcttgcatcaattggccgcgacgctccaccagcttgaccgcctcacccaaggtcaggctacccgccgcaaccagggcgctgtattcgcccaggctgtggccggcgacgaatgcagggcgtgcgccgccttccgccagccacaagcgccacagggcgatcgaagcggtcaggatggccggctgggttttatcggtttgattgagttgctcttccggcccttgttgggtcagtgcccacaggtcgtaacccagggcgtcggaagcttccttgaaggtgtccagaatcagcgggtattgcgcgctcagctcggccaacatgccgagggactgcgaaccctgccctggaaagacgaatgcgagggatgtagacatgtaacaagcccctaatgatctggtcgtcaaaaaagcgcactcctacagtgggagcgcacgaaactgacagattggatggtcaattgaactggccggtcacatttaagcactcccgggccgattcgcctaaggcaacaggtcctcgagacggccatgcaagcgttgcggcaggttttcctgaatctcgatcacagcccgcgcgatcgcactttgaaacccctcgacaccggccgagccgtggctttttactacaatgccctgcaaccccagaaaactcgcgccattatgccgtgccggggccaggtccgcctgcaggcggcgcatcagcggcagcgccagggcaccaaccaggcgcgacgccaagctctgcttgaacagcgcttcgatacgcgtggcgatcatggtcgccaggccttcgctggatttgagcaggatattgccgacaaacccgtcacacaccaccacgtccgcttcgccacggtacaagccgtcaccttcgacaaacccgacgtaattcaacccccgcgcgccttgcagcaacgtggcggccagcttgacctgctggttgcccttgatgtcttcggtgccgatattcagcaaggccacccgtggccgggccacgcccagcgcttcggcggccaccgagcccatcacggcaaactggagcagatgctcggcgctgcaatcgacgtttgcgcccaggtccagcaactggcaatagcctttctgcgtcggaatcgccgccaccatcgcgggccggtcaatgccgggcagcgtcttgagcacaaaccgcgacaacgccatcagggccccggtattgccggcgctgacacaggcttgcaccttgccatcacgcagcagctccagggccacccgcatcgaagagtcaggcttgccacgcagggcggccgccggcttttcatccatggtgatggtttcgctggctggcgtaatcgtcaggcgcgcgcgatccaccgccggatggctggcaatcagttcttcaagtaaggagggttgaccgacaagggtcaggtgcagcgagggtgttgcagacaggctggcaatgcaggcctgaacaatgctgcggggaccgaagtccccgcccattgcgtctatcgcgatgactagagcagacaagtgattactcgtcagcgcccttgtcgatcactttacggccacggtatacgccttctggcgatacgtggtgacgcaggtgaacttcaccggtggtcttttccacggacagggtgctagcctcgagagcgtcgtgcgaacggcgcatgtcacgggcggagcgggattttttgttctgctgaacagccataattgattaactcctaaacgtttgggtcacgctttaactgcgccaatacactgaacgggttggaccgcgttacctcgtcctcgctcggttcgggctcgtcatcgaggcccgccggctgctggcattcttccggatgatgagcaggcacaatgggcaaggcgagcagaagctcctcctcgatcagtgcatgcagatccaaaggatcttcgcccagttccagcacgtcataacctttcggcaacgactgggtattcgcaccctccttcaccacagcataactgcactcgctgtggatcggcagggtgaccagctcaagacaacgctggcaaaccattttgacctcggtgtcgataaaactgtggattaccacagatttacgttcatctcgttcaaaaacgaatttggcctgcaccgtaccgacagtgtcggaaagcgggtcgcagagtctctccaaatcggccagcagcaactcaccttgaagggaagtgccacgatcagccaatttgcgcgggtcaacgtgaggtggaatcgggtcattcaacataggcgcagcattatagggatgcacccagccatgtcaaaggaaattcagccctgtgcgtcagccggtcgccccgctagaatccgctgccgacctgaggagacgcccatgctgcccttattactcgcatccagctcggtgtatcgccgggaattgctgagccgcctgcacctgccgttcatctgcagctcgccggatatcgatgaaagccaccgcgcaaatgagtccgccatcgaactggtcaagcgcctggccgaacagaaagcccgcgcccttgccgccagccatccggggtatttgattatcggctccgaccaggttgcagcgctcgacggacggatcatcggcaagccgcacaccttcgaaaacgcccgcgagcaactgctggccgccagcggcaagcgcgtcagttttctcactgggctggcgctgctgaacagcgagacaggcagctgccaggtcgactgcgtgccttttacagtgcacatgcgtgagttggatgccgagtgcatcgagcgttacctgcgaattgagcaaccgtatgactgcgcgggcagcttcaaggccgaggggttgggcgtgagcctgttccaaaataccgaagggccggacgccaccagcctcatcggccttcccctcattcgcctggtggatatgctgctggccgaaggcgtgcaaattccctgagaacaccacaagcaaatgcgggagggggcttgcccccgatagcagaggatcagccaactaacccgcagctgacccaccgcaatcgggggcgagccccctcccacattttgatctatatgtagcctggggctcagcgcaggcttgggccttggaagcccatgtaaaaggccagcttctccgccacgctggcaccgagccgcttggagaaacgatcaaacggcgattcctcaaccgtgaaatccaccagttccttctcgccaatcacatcccgcgctaccgaactggcactgcccaggccgtcgatcaagcccagcggcaaggcctgctcgcctgaccagaccaggccggagaacagttccggatggtccttgtccttcagacgatccccacgccccagcttcacgctggcgatgaactggcgatgagtggtgtcgagcacgccctgccagaactgggtttcatcggctttttgcggctggaacggatcaaggaacgacttgtgttcacctgaggtataagtgcgacgctctacccccagcttctccatggtgccgacgaaaccataaccggccgccgtcacaccaatggagcccaccaggctggccttgtcggcgtagatctgatcagcagcactggcaatgtaatacgcaccggaagcgcccaggtcggaaatcactgcatacagcttggtatccgggtgcaggccacgcaggcggcggatctcgtcatacacataacccgactgcaccgggctgccacccgggctgttgatgcgcaggatcacacctttgaccttagggtcttcgaacgcggcacgcaggctgctgacgatgttgtcggcgctggctgactccttgtcggcgatcaccccgcgcacttcgatcagtgcggtgtagttggcgccacgggttgcgcttttctccatatccatcagcggactgaacagcgccagcatgccgatgagccagacaaacgtcagcagtttgaagaaaatcccccaacgccgcgcgcgacgctgctcttggacgctggccaggagagtcttctccagcagcttccagcttttgtcatcactgctttcagccttttcgggcgctttccactcgtcactcatgccatcaaccccagcaaagacttattgggcctggttgagccaggcctgcaattcggaaaaatgatcgatcgtcagtcgcggttcatattgctgcaacgcctcggcagcctgggcgccatagctgaccgccacgccgtccatgcccgcattgcgcgccatcatcaggtcgaaggaggcatcgcccaccatcaaggcctggcgtggcgacacgccgcaatgagccaggatctgctccagcatcagagggtgaggcttgctggcagtttcatcggcggcgcgggtgatatcgaaataatcttcccaaccgtgggccttgagcacccgatccagaccgcgacgggccttgccggtggcgactgccaggtgataaccctgggcacggaatgccgccagggattgcaccacaccgtcgaacagcggcgagggcgtagcctccagggcgatgtagtgatcggcatagtgttcgcgaaacgcgaccagttcagcgtcgctgatctcgggatacagggtacggatcgcttcgggaaggcccagaccgatgatgcccttgaccgccagatcactgcacaacgcgtaacccgaacgggtcgatgcagcgtgcatcgactcgacaatccggccaatggagtcggccagggtgccatcccaatcgaatatcagcagtttgtagtcaaggtgcgacactcaagcgctccacggtcttggcccacatctcatcgaccggcgcctgcagcttcaattcgccaccatcgggcagcggtaccgtgagcatgtaggcgtgcaggaacaggcgcttgccgcccaggtcgcggatctccttggagaaatcctcgtcgccgtacttggtgtcaccggcaatgcagtggcccgcatgcagggtgtgcacgcgaatctgatgggtgcgcccggtgaccggcttggcctcgaccatggtggcgaagtcgccgaaacggcgcagcaccttgaacagggtcagggcttccttgccctcctcgtccacttcgaccatgcgctcgccggagcgcaggttgctcttctgcaacggcgcgcggacgctcttgatcgagctggcccagttgccgcgcaccagcgccatgtagcgtttgtctacgccatcgccgcgcagggcggtgtgcaggtggcgcaacatgctgcgtttcttggcgatcatcagcaggccggacgtgtcgcggtccaggcggtggaccagttccagctccttggcatccgggcgcaactgacgaaaggcttcgatcacaccgaaattcaggccgctgccaccgtgaaccgcaatgccgcagggcttgttgatcacgatcagcttgttgtcttcgaacacaatcgaggcttccaggcgctgcaacaagccctgggccaacggcacaggctcgtcacgctcaggcacgcgcaccggtggcacgcgcacgatatcgcccgcctgcaacttgtactcgggcttgatccggcccttgttcacccgcacttcacctttacgcaagatgcggtaaatcaaggtcttgggcacgcctttgagcctggccaggagaaaattgtcgatgcgttggccggcatattccggcgagacctcgagcagctggacgctgggggtctggggggcggtagtcgtcatggcggcgatgataacaattttttatggaattgaagcacttaatcattgctgctatagtcgcgaacgccgccaaaagcggcctggacagaggacatgcggcaaactgccggccctgaccatcgcaattcatcaggacgcgaggccgtcctacggggctttcgccaccctggaaggctcaagattgtaacaagcgcaggtgacatgaggcctgaagcgagtgcagaaagcagagtgaatactcgcgttttgcgccgatatttacggccagttcacaaagtgcagtcagtcttgagccagaccacggcgaatacttcggaaacaacgcctgttaagagctgagtgagagcgcaaccgcccacacctagtcttgtttagccatgagcgtggactccccattggagaacacggtaaatgccaacccgctgcggattctgcgcgcggcagcacccgaattatcagggatacgtgtagggtggagatgcacaaccgtcggaccgtgtagcactaggcttatatttagacgcttcatctcgtccacagtcgccggttgattcctcctcctgaccttagcttttgttgaagtggtgcctttgtcaccaccgctaacaagcaggacgcgtccgtcgcgataccggcccaattggctcgttattgctggacactggagtggccaaccactcttgacgcacctgacaccgaccgtgagaagtcgtgtgtgccgaacgccgtttccggcagcccggaaaccgacggtacaacatgaaaagaatgctgattaacgcaactcaacccgaagagttgcgtgttgcactggtagatggccaacgcctctacgacctggacatcgaatccggtgcacgcgagcaaaagaaggccaacatctataaaggccgtattactcgcatcgaaccaagccttgaggctgcctttgtcgatttcggctccgagcgccacggcttcctgcccctcaaagaaatctcccgcgaatacttcaagaaagcccccgaaggccgcgtgaacatcaaggacgtcctgagcgaaggccaggaagtcatcgtccaggtcgaaaaagaagaacgtggcaacaagggcgccgccctgaccaccttcatcagcctggctggccgttacctggtcctgatgccgaacaacccacgcgccggcggtatttcccgtcgcatcgaaggcgaagagcgcaacgaactgcgtgaagcgctgaacggcctgatcgcaccggccgacatgggcctgatcgtgcgcaccgccggcctgggccgcagcagcgaagaaatgcagtgggacctcgactacctgctgcaactgtggaccgccatcaaggaagcctccctggatcgttccgcgcctttcctgatctaccaggaaagcaacgtgatcatccgcgccatccgcgattacctgcgccaggacatcggcgaagtgctgatcgacagcgttgaagcccaggacgaagccctgaccttcatccgccaggtgatgccgcagtacgccagcaagatcaagctgtacgaagacagcgttccgctgttcaaccgtttccagatcgaaagccagatcgagaccgccttccagcgcgtggtcgaactgccttccggtggctccatcgtgatcgacccgaccgaagccctggtgtccatcgacatcaactcggcgcgcgcgaccaaaggcagcgacatcgaagaaaccgccctgcagaccaacctggaagcggctgaagaaatcgcccgccagctgcgcctgcgtgatatcggcggcctgatcgtgatcgacttcatcgacatgaccccggccaagaaccagcgcgccgtggaagaaaaagtccgtgaatgcctggaagctgaccgtgcccgcgtacaggtcggccgcatctcgcgcttcggcctgctggaaatgtcccgtcagcgcctgcgtccgtccctgggcgagagcagcggcatcgtctgcccgcgttgcaacggcaccggcatcatccgtgacgttgaatcgctgtccctggcgatcctgcgcctgatcgaagaagaagccctgaaagaccgcaccgccgaagtccgcgcacaagtgccgattccggttgcagctttcctgctcaacgaaaaacgcaactcgatcaccaagatcgaactgcgcacccgtgcccgtatcgtcatcctgccgaacgaccacctcgaaacgccgcacttcgaagtgcagcgcctgcgtgatgacagcccggaagcccacagcggccagtccagctacgaaatcgccgcagctgccgccgaagtcgaagaagtgcagccagccgccgcgacccgtaccctggtccgccaggaagccgccgtgaaaaccgctccggcccgtgccaacgcaccggttccggttgaagccgccgctccgattgccgccccggccgtaatgcctgagccaagcctgttcaaaggcctggtgaagtcgctggtgagcctgttcgccaccaaggaagaacctgctgcaccggttgtggttgagaaaccagcgaccgagcgccctgcacgcaacgaagagcgtcgtaacggtcgccagcagagccgtaaccgcaacggccgtcgtgacgaagagcgcaagccgcgcgaagaacgtgcgccgcgtgaagaacgcgccccacgtgaagagcgtgcgccccgcgaagcccgcgaagaaaccccgaccgtagaacgcgcaccgcgtgaagagcgcgcaccgcgtactccacgtgccccgcgtgaagaccgcaagccacgtggcgagcgcgaagagcgtgtgcgcgaactgcgcgagccgctggacgctgcgccagccgttgccggtgcagctgttgttgccgaagaacgcccggctcgccagccgcgcgaagaacgtgcgccacgtgaagaacgccagcctcgcgctccgcgtgaagagcgtcaaccacgtgccgaacaggccgccgccgccagcgaagaagaagtgttgaccggcgaagagcaattgcaggaagacggtcaggaaggcgccgaaggcgatcgtccacgccgccgctcccgtggccagcgtcgtcgcagcaaccgtcgtgagcgtcagcgtgatgccaacggcaacgtgatcgaaggctcggaagagaccggcgaaaacgcagaagccgctaccggcgaaccgactggcgccgaactggctgccggcctggccgttaccgctgccgttgccagctcggtcatcagcgctccggctgaagcccaggctcacgagcaggctgagcgcgctaccgcgactgttgaagaagccgtcgttgtagaagcacctgctgccgagaccccggtggttgaagcgccggtcgttgaagcacctgctgccgaaaccccagccgtagaagcgcctgttgttgaagcgactaccccgatcgaagcaccggttattcctgaagtggaagttgctccggttcaagaaaccctaccagaagttgaagcggtggctgagcaagcaccggtagtcgagcctcaaccagtggttgaagcagtggttgatgctgctccagaagttcgtgaagttcgtgaagaacagaccgccttccaatggactgccgagcctgccgctccggttgaagcgccagcacctgccccagcggtagaagaagcgccggcaccggttgccgaagttgtggttgccgagccagccccagtggttgagcccgctccggcctttgaacctgcgccggtggtagaagtgccggtggttgccgaagtggctgcacccgtggttgaagccgctccggtcagcgccctgaccgaaaacggccgtgcgccgaatgatccacgtgaagtgcgtcgtcgccgcaaggaagctgaagccgctgctgctgccgcagccgcagcacaggaagcagagcacgagagcaaacctctcgtctgattcccgcagcaactaaaaagccccgcctgagtgatcaggcggggcttttttatgttcgttcgattagaggtaatgcaacaacgcaggcacgtccacatcccataacacgccagggtcatctacaggcacctcacgcacagtcgcctgggcaaacaacggcttggctccacgatcaccggtcaaagccatcaactcaggcccaaatgcccggccaaacgccacaggatgcccgtaatgcccgtcctgcaccggcacactgatgccaccctcctccaaccccgcaatcactcgctcaatgctcgatgactgaataaacggcatatcccccagcaccaccagccaaccattcgccgaagcactggcggcaaccgcagcggcaatactgtcgcccatgccggccgagcacagcagcaataccttgcagccgtaggcctctgccaggcaaatcacttcagaccgatccggtgaagtcaccacccagcgatcaaccacgacactcggtagattcttcagtacctgctcgatcaccggccgaactacaccacccaggcccacacaatccgccagcaacttatcctggtcagcccctgccaccgcgcgaaaccggctgccctgtcccgccgccagcacaatcgcggtgatgctcactcaaccaccaccggcagcggtttcttctgcatcggtgccacgccgttcttgatcgcgacaatttccgccatcaacgacaatgcgatttccgccggcgtgtgactgccgatatgcaaaccgatcggcccatgcaggcgcgcaatcgcttgcgtcgataaccccagcgccgccaggttctcccggcgcttctggctgttgacacgtgaaccaagggcaccaatgtagaacgccgaggaattcagcgccgtcagcaaagccatatcatccaggcgcgggtcatgggtcaggcagacgatggccgtgcgctcgtcggtctggatattcaacactgcgtcatcaggcatgcccggcacaaagcggccgtgctgctcttcccagccgtagacgaactcatcacgcgggtcgcagatcagcacttcgaaatccagcaggcgcgccatttccgccacataccgcgacagctgcccggcgccgatcaacagcaggcgccagcgtgggccatagatggctcgcaggcgttcaccgtcgaaggtgacgacatcggtcttgctcgcgccactcaacgtcaccttgccagtggccagctccaactcccgggcgacgatctgatgatcctcgcaccgcgccaacagctcagccacccactcccactcgtccacccgctcctcggtcaggcgcaaggtgccgccgcacggcaggccaaaacgcgccgcctcatcgcgggtgacgccgtaggtcaccaactgcaccggcggcccgtcttcaggcagccggccatcctgcaggcgggcaatcaagtcgtcttcgatgcacccgcccgataccgagccgatcactaccccatcgccccgcaatgccagcatggcgcccggcgggcgcggcgcgctgccccaggtctggaccacgctgtacaacaccactcgctgtccggcacggcgccattcgagcacgctgcgcaggacattcagatccacactgtccacataacctcctgcaagcgttaaaaccgagtcattcactgtaaaacaaaagtcgccgaagtgacgcgccagaaacgcaaacgccccgaaccagtcggggcgtttgtgcgttgctgtcggcgttagttcacgccatcggcgatttacttgaccacaggtgcagggccttcggccacgcccaggtcatccagttcacgggtttccgagataccggtgccgccggacgccagctcgctttgcagcttgtcggtatccagctccttgacccatttggccacgacgatggtggcaacggcgttacctacgaggttggtcagcgcacgggcttcggacatgaagcggtcgatacccagaatcagcgccaggccggcaaccggcaggtggcctacggccgacagggtggccgccagtacgatgaagcccgaaccggtcacgccggcagcgcctttagaggacagcagcagcaccagcagcagggtgatctggtgggtgatgtccatgtgggtgtcggtcgcctgggcgatgaacacggccgccatggtcaggtagatcgaagtaccgtcgaggttgaacgagtagccagttggaatcaccaggcctactacggatttcttcgcgcccagacgctccatcttgatcagcatgcgtggcagtgcggattcggaggaggaagtacccagtacgatcaacagctcttcacggatgtagcggatcagtttgatcacgctgaaaccgtgagcgcggcagataccgcccagcactaccagcacgaacaggatgcaggtgatgtagaagcagatcatcaactggcccaactgcaccagcgaacccacaccgtaggcaccgatggtgaatgccatggcgcccagggcaccgattggcgcgagcttcatgatcatgttgatgatgttgaacatcacgtgggcgaagcgatcgatgaagtccagtaccggcttgccgtaggcacccaggcggtgcagggcgaaaccgaagatcaccgagaacatcagcacttgcaggatgtcgccgttggcgaaggcaccgacgatcgtgttcggaataacgttgaggataaagccgacgatgctctggtctttaccggcggtcacgtaggccgcgactttggaagcatccagggtcgctacgtcgatgtgcatgccggcgcccggttgcacgacgttcaccacgatcaggccgatcagcagcgcgatggtggaaacgatctcgaagtacagcagcgcgtagccgccggtcttgccgaccgatttcatgctttgcatgccagcgatgccgctgacaacggtgcagaagatgatcggggcgatgaccattttgatcagtttgataaacccgtcacccagcggcttgagggccacaccggtctgtgggtagaagtgaccgagcaaaataccgataacgattgcaacgatcacctggaagtacagggatttgtagataggctgacgagtcgtcattgcaaagttcctcaatcgtcccgtgtggcaaatatccgccattgcccacgacacttgaattgcgaaccctcctgcactggagggatttgttgtttgcgaggtctgtaggtccagcctgcgctgtaatccttgtcgcaaacaccgtgccactttgctgaaaaaccctgaaggcctttagacatcagggcttgggcttctccggccccctcccaagcctccaatcgagtggcggatttccgcccagcgccccaatcacgtcctacaatttggcggatatccgccttgtgaccctacccgggcatgactaccatccgcctctccatggacgaggccttcgcatgcgtgaacgtaccatcgccagccattacgctcgggcagccctcggcggcgcgcgcagggcgggctacgactactcgggcctgctgttgcaggcaggcatcaccccggaactgttgaccgaaccccgcgcccgcatcgcaccggaacaatttacccggctgctgcaaatgctctggctggcgttggacgatgaatacctggggtttgccgacggcccgagcaaacgcggcaccttcgccatgatgtgccacgcactcatccactgccgcaccctggaaaaggctctggaacgcggcttattgttttatagcctatttgcgcaaggcccacgctggcagctgacacgtgaaggcgacatggcccgcttgagcctggacgactcgcaactgtgggacccggatcacttcctcagcgaatgcctgctggtgatctggcatcgactcggcagttggctgatcggccaacgcatccgcctgcaccaggccaccttcagctacccgatgccggcccacgccagcgaatatgacctattgtttccctgtgcccaggtattcggcgcaccgaacagcagcctggtgtttcacagccgctacctgagcctgccgctgctgcaggacgaacgcacgctcaagcacttcctcgagcgctcccccgccgacctgttgtcccgcccggatgaaggcgacagcttgagcagccagctacgccgcttgctcagccgcgaccaaacaccctggcccgacctggaagccgtcgcccagcacctgcacatcagcccgcagaccctgcgcaggcatttgcgcgaagaaggcaccagctttcaggcactcaaggatgagttgcggcgggacatcgccatctatcatttggggcgcgcggatttgtcgttgcaggagattgccgagcagttggggttttccgaaccgtcggcgtttcatcgggcgttcaagaagtggacggggttgacgccgggggcttaccgagcaaaagagagttagagatgtagcgcctggactaacgctatcgggggcaagccccctcccacctttgaatgtgttcaaacatcaaaatgtgggagggggcttgcccccgatgaggcctgcacaccccataaagatcacaaagccgggaagtgaatcctgaaagcggcgccacccaatggcgaatcgcccagggtcaaccgcgcaccgtagctttcgatgatgtccttgaccaccgccaagccaatcccctgccccgggtgctggcgatccaggcgctcaccccgttgcagaattcgtgcacgctgatccggcggcacgccaggcccgtcatcctcaatacacagctcggtgccttccaggctttccaccaggctgatgcgcacttcgctcaagcacaggcggtaggcgttttccagcaggttgccgagcaactccaacaaggcgcccttctcgatcggcacatcgcattcttccggcaggtcgaaggacacgctgacgcgcttgtcgcggtagaccttgcccagcgtatcgcacaggctttgcagcaccggctccaggcgcacctggtggcgcaccaggccgcttttgcgcaggctggcgcgctgcaactgatagctgatctgctgactcatgcgctcgatctgcgattgcagcacccgggcctgctcgcgatcttccggacgctgggccatttcttcgctcactccctgtaaaacggcgagcggggttttcaggctgtgggccaaatcgtcgagggaatcgcggtagcgcacgcgttgctcacgctcgctgtgcagcaagcggttgagggagccggtcaggcgcagcaattcgcgggggtgctgttcggagaggctctcacgggtgccgccttcgatctggtcgagttcctggctcagccgccgcagggcttgcaggccccaggtcaggcccagccacagtaaggtcaacagcaccagcaaggctgcgccgaagcccaggtagagattttcgcgcaggccttccagggtcaactggtattcacgcaccggttgcagggccacgatactgaaggcggcgctcttgccgcccagtagcctgacctcgacgtcatacacgaagaattcctggccgttggcctcgcgaatccgcgcaaactcgttaccgcgcccgtcgtaacgcggtttgtagttgatgttttcttccttggtcgcccgcgaacgccacaccaggtggccttcgcggtcgtagatgtagccgagcaggcggctgtcagtgaggttgaagcgttcgtcgggcaactgcgccggcatcagcaggcggttgttttcgacccgcgcggcagagatcaaggtggtgacgtccgacgccaggcgttgctcgatggaatcctgcaacgccaggctgaacgccccttgcatggccggcaacaggccgagcatgaacagcacggccaaggtcgcggccgccagcatcaagcgcacgcgtagcgagcgaatcaacggcagcgctcattgaacagatagcccaggccacgcacggtgtcgatcggcttgaacccggccgggccttccagcttgcgacgcaggcggccgaccagcacctcgatgacattcggatcacgctcgtcgtcatcggggtagagctgttccatcaagcggtctttggcgaccacttgttggtgatgacgcatcaggtattcaaggatccgatattcgtaggcggtcaacgccagcggctgctcttcgagcgacgcctgcttgcggttgagatccagcagcaacggcccggcaacgatggtcgactgggtaaagccactggagcggcgcagcaaggcgttcatccgcgcctccagctcttcgaactggaacggtttgaccacgtagtcgtcggcacccgcagccaggccttcgaccttgtcctgccagttaccgcgggcggtgaggatcaggatgggaaaggtcttggcctgagtacgcagttggcggatcaggtccaggccgcccatgccgggcaggcccaggtcgatgatcgccaggtcatggttgaactggccagtctggtacagcgcctcttcggcattggccacggcctcgaccacatgcccgctgtcggtcaggcgggtaaacaggtgatggcgcagcagcgcctcatcttccaccaccagcaatttcataaggctctccaaggcaattcaactgtccgacagagggatatcatagcggccctgcagctcttgcgggcgcagttttatgccattgaactggccggtcaggtgttcataaccggcgcgatagcccgcctgcggggtgacaagccccagggactggccccagggcgtgggttggctgcccacttcttcgaagctgacacgctggatcaaggtgctggatttcttggttttttcaccgccgaatgcggcgaaggcgccgtcggatgcctggaccccagcggtggcactgagcatggttaacgccaacatcagctgtttgatcgcagtcatggtgttacctctatgcgtttggctgtatgccccagactacgcaggcgcccctgaactccccctgaacgggctctgaaccccacctgaaccacagcgggctatcctcgcgcccctcaactcggcaaaataccgcccatgaatccgctacccgcttgctgcaccccactcgacgcccattggccgctgcccgaatcgttgcccggcacggtgtttctcagcacgcgttttgacccggccctgctcacgcctggcgacttccagcgctgtgccgtgccgccaccggcgagcatccagcgctcggtggccaagcgccaggccgagttcctcgccggtcgcttgtgcgcccgtgccgccctgcaacaactcgaccacctcgactgcatccccacgatcggcgaagaccgcgcaccggtgtggcccgcgcacatcagcggctccatcacccacagcaccgggcacgccgccgcgattgtcgcgcacaaggcgcaatggcgcgggctggggatggacctggagaatgtgttgagcctggagcgggcggagcggttggccggggaaatcctgacggctgatgagctgcaacgcatggccaccttgccaagagagcagatagcgcagttggtaacgctgacgttctccgccaaggagagcctgttcaaggcgctctaccccattgtgcagaagcgtttctactttgagcatgccgagttgctggaatggtcagaggccgggcatctgcggctgcgactgctgacggacctgtccgaagagtggtgccatggcaaggaattggtggggcagtttgcggtgggtgatgggcagctgttgagtctggtcgcagtcagcgcctgatccatcaggatttatcctgatccctgggccaactcaaactgaaacacgcgccgcccaagttattgctcttgctgatcaacgcccgcccaccgtgccaatagataatccgccgcacaatcgacaaccccaggccatgcccgcccgaggcacgggtgcgactgtcgtccaggcgcagaaagggcgtgaagatgcgctcccaggcgctttccggcacgccggggccgtcgtcttccacgtcgatgcggcagcgtacctggcccacctgataactgatcaacacctggccctgggcgtggcgcatggcattgctcaccagattctgcaacgcacggtgcaggtagcgcggctcggcatcgacccaggcgtcgtcccaatgcgccgaagacaagcaaataccacgggctacatttatttgcggacgcagtggcgataattcgccgatcacctgatcgagcagcgcatcaaggtcgacccgttggaaattcagctctggcgagccttgttccaggcgcgcataagtgagcatttcatccactaggccgtcgaggtcctggatgtcactgtccatgccctccaggtatttacgccgcgcctcgacggtagtcgcgtcgccgaccatctccagaccaaaacgcaagcgtgccaccggcgtgcgcagctcgtgggacaccgcgcgcaccagttcgcgctggatcgccagcagctgttgcaaatgctcggccatgccattgaacgccgccgccagccgccccaccgaatcggcaccacgggccggcacccggacttccaggttgcccttggcgatccgcgtggcggcggcttccagaccgcgcagccgacgttcaagctggcgcaccaatagatagacgatcagcccgatcagggtcaggccgatcaaggcgatcaggatcagccattgcgccgggtaagggttcatctgatacaacgggccgatctccagcacccacggcgtaccgaccatgccggcaaacacgcggatcgaatcgccgcccttgcccagggccatcaccgtatcgccttccgatacacgacggcgctggtcttcatccatatcagcctggtcgaggggcatcaggtgcatgtcaaagccaaagcccttggcttcctttatctgcgccaggcgttgcggctgttcggccaccgggaagcgcaccagctcatcggccagcaggtagatggtcgcgcgcgccagttgttcgctgatctgctgcacttcacccgtcagcacaagcggctcttgttcgctgaccaagcgcagtacccgcgcggcatgtggcccggtctgttgcaccagcacctggccgcgttgcaggcgattgcgctggctcaagtccagttgtgcatcggccagcgggcgcaactccagcgggatccccagcaaccgctcccacaccgccagggcgcgctggcgctcgatggcactcatgggttgcaggttgtcgcccatcaaggcgaaggtgccatgggccaggcgctcgcggtactgaccgctgcgcacctcgttgagcaggtgcagggcgagtacgccgagcagcgccaccaggatcagcgccgcgcacatgccgccgtagatgcgcaggaagatcgagttcacagcggcatgtcggcggcggcttcggggacgaacaggtagcctttgctgcggatagtcttgatcaggcgcgggtggatcgggtcgtcacctatcttggggcggatgcgagaaatacgcacgtcgatggagcgatcctggccgtcgtagccgatgccgcgcagggcaatgaagatttcttcgcgggacagaatgcgcccggcattcgccaccaatagccacagcaggtcgaactcggcgctggtcagttcgatgccgtcattattcagccaggcttcgcgcagggcattgtccaccaccagggggccgaattgcaggcggcgctggttctccgcgctggcggtctcggccgactcactgcgccgcagcaaggcctggatgcgcgccagcagcaggcgcggacgcacgggcttgcacacataatcgtcggcgcccatgtccaggcccagcacctggtccatgtcgtcggtgcgcgcggtgagcatcaggatcacgccgtcatagcgctcgcgcaccttgcggcagatgctcaggccgtcttcgccgggcagcatcaggtcgaggatcaccaggtcgggctgttcggcgatgatccgcgccgctgccagggcgccatcgccctccaccgagacgcgcaggccgttgctctccaggtactcacgggtcaactcggccaatcgctggtcgtcttcgactatcaatacctgccaggcttcttgctccacgggtgacctcaatgtctgtcataaaaggcgggcatgatgtgggtcacttcttagcccgatgtgggcgattgtagccatgggccagccctcaaacacaagccgggaaatccattcggtgatcgcgtttttttgtgatagggttcgcgcccttcgaaaatgggccgcttgttttgagcccgtaacatttaatgacaaacggtgtaatccagcagcaatgcggcctacacggctgttctacctttcttacacattttacccacagcgttatccacaggttactgcgttgctaacccctcaaaaacgcattatcttgtacctcggcactacagaagaccctacatgtggggttttcacagaaatcgcccaaccacacaagtggctcgaaattcaagcgttttattgctagcgcagcatggaaccaaccgattttcagtagaccaaaccgctcacgcggatggcagctgtttcccatccccgatatggaaaacggtacgggtgttgcaggaagagcctggcactcgcaatcaaatatagaacgtggagacaaccccccatgcaaaccgacacaactcgcgagaacccgcaaggctccgtgccgcaggccgccgattcgaacctggatctgtccgccactgcacccggccaattgcgcgtgatcaagcgtaacggcactgtcgttccttacaccgatgacaaaatcaccgtcgccatcaccaaagcgtttcttgcagttgaaggcggcaccgctgctgcctcgtcgcgcatccacgacaccgttgcccgcctgaccgaacaagtcaccgcgaccttcaagcgtcgcatgccatcgggcggcaccatccacatcgaagaaatccaggaccaggtcgaactggccctgatgcgtgccggcgagcagaaagtcgcccgcgactacgtgatctaccgtgattcgcgcgccaaggaacgtgccgtacgctccccggccgaagaagccgccgtgcaagcgcatccgtcgattcgtatcaccctggccgacggcagctttgcaccgctggacctgggccgcctgaacaccatcatcaccgaggcctgcgaaggcctggaagaagtcgacggtgacctgatccagcgcgaaaccctgaagaacctgtacgacggcgtggccctgaccgacgtcaacaccgccctggtgatgaccgcccgtaccctggttgaacgcgagccgaactactcgttcgtgactgcgcgcctgctgatggacaccctgcgtgccgaaggcctgggcttcctgaaagtcgccgacagcgccactcatcatgagatggccgacctgtacgccaaagccctgccggcctacatcgccaagggtatcgaattcgaattgctgaacccggtcctggccaccttcgacctggaaaaactcggcaaggcgatcaaccacgagcgtgaccagcagtttacctacctgggcctgcagaccctgtacgaccgttacttcatccacaaggacggcatccgcttcgaactgccgcaagtgttcttcatgcgcgtggccatgggcctggcgatcgaagagaagcacaaagaagaccgtgccatcgagttctacaacctgctgtcgtccttcgactacatgtcgtcgaccccgaccctgttcaacgccggcaccctgcgtccacagctgtccagctgctacctgaccaccgtgccggacgacctgtcgggcatctaccacgcgatccacgacaacgccatgttgtccaaattcgctggcggcctgggcaacgactggaccccggtgcgcgcactgggttcgtacatcaagggcaccaacggcaagtcccagggcgttgtaccgttcctgaaagtcgtcaacgacaccgccgttgcggttaaccagggtggcaagcgcaaaggcgctgtctgtgcctacctggaaacctggcacatggacattgaagagttcatcgagctgcgcaagaacaccggtgatgaccgtcgtcgtacccacgacatgaacaccgccaactggatccctgacctgttcatgaagcgtgtcttcgatgacggcaagtggaccctgttctcgccatccgaagtgccggacctgcacgacctgaccggtaaagccttcgaagagcgctacgagtactacgaagccctcaccgagtacccaggcaaggtcaagctgttcaagaccatccaggccaaagacctgtggcgcaaaatgctgtccatgctgtttgaaaccggccacccatggctgaccttcaaagacccgtgcaacctgcgcagcccgcagcagcacgtgggcgtggtccacagctcgaacctgtgcaccgagatcaccttgaacaccaacaaggacgagatcgccgtttgcaacctgggctcgatcaacctcccgaaccacatcgtcaacggcaagctggacaccgccaagctggaacgcaccgtcaacaccgctgttcgcatgctcgataacgtcatcgacatcaactactactcggtgccacaggcgcagaattccaacttcaagcaccgtccggtgggcctgggcatcatgggcttccaggatgcgctgtacctgcagcacattccttacggttcggatgcagcggtcgagttcgccgacaagtccatggaagcggtcagctactacgcgatccaggcttcctgcgacctggccgacgagcgcggcgcctacgagacgttccagggttcgctgtggtccaagggcatcctgccgctggactcgcaacagatcctgatcgaagcccgtggccagaagtacatcgacgtcgacctgaacgaatccctggactgggcgccggtacgtgcccgtgtgcagaaaggcattcgtaactccaacatcatggccatcgcaccgaccgccaccatcgccaacatcaccggcgtatcgcagtcgatcgaaccgacctaccagaacctgtatgtgaaatcgaacctgtcgggcgagttcaccgtgatcaacccgtacctggttcgcgacctcaaggctcgcggcctgtgggactcggtcatgatcaacgacctgaagtactacgacggttccgtgcaacagatcgagcgcatcccgcaggaactcaaagagctctacgcgactgccttcgaagtggacaccaagtggatcgttgacgccgccagccgtcgtcagaagtggatcgaccaggcgcagtccctgaacctgtacatcgccggcgcttcgggcaagaagctggacgtgacctaccgcatggcgtggtaccgtggcctgaaaaccacttactacctccgtgccctggccgcgaccagcaccgagaagtcaaccatcaacaccggtaagctgaacgcggtttccagcggcaaccatggtgatgactcggtgcttgcagccccagccggcccggcgccagtgccaaaggcctgcgcgattgacgagccggattgcgaagcttgtcagtaagctgaggcactttcaggtttaactacctgaaacagcgagccccctgtaagcccaggatttcaaccgggcttacagggggcttttgattacaggagatccctctttttacttaggcatacccccgcttgaagctccaggcaatcaaattgggatcagtgcgtgcattgccgaacttcgtaccccatcgatcctcattaccgcccattaccgccaccgaatgtgttgaattatccaaggtgccgggccggcccctggccaactcagaaggactgactctctctacaagatttttataccccaaccgatcgaaagtctccttagcccactccccattattgatgctatcaatggcttcgctgaagcttctcccggaaataccgtcgttacgctggttcattgcctgaacgttattcacggccaacatgagattcataaacccaagcaacttgggatcctgtccctgtagttgagcccttgctgctgtctcacggtactgcgactgcgtaacccggacatgattgccgtctttgagcgttacatcgtaattacctgctgagtcccgcttgacgtccttaaacacacccgctggcccatactgcgcaatcatggccttacaagccgaaatagcgccgcaattacctgcttgtccctgataggcaccggaaaagagatttttcggcatttcaccaggtttgtagctacccggctcgaaattggtttgatgggttcccgccgtgaccggcaagttacccaccgcctctcctaaccctaaccccccacggtcaacgccaccgccttcgtaacgaccgcgtccaccaccgccaccacccgaaccaccaacaccacctcctatcccgcggcttgactgcgattcaacatcagtcgacacgccatctggaaacagctcaggaaacagtgccttcataaactcaagccaactgttaggcgcgtccttttttaactgctcgataatctccttgaacttgtcctcccccaacttcttgcgcaaatcattcagcttgtcacgcaagtcttgaacagtctggttcttggaggttttctgagcgtcttccagttccttgagtagttttaagacggcatccttatcagcagctgtgctgtctttggtttcctcagtgcgcggtacacccgtccctccttgccaatacaccaagcccctatcgcccgacgtcaataagtcccacataaccttcgcctctaacaaaactattggctcaatgggtggagcaagaggtgtaggtagttccagcaaatcgtgtgatctcttgagcgggtagccctgccaaaaaatcaatgcaaaaaaaacccctcagtcgaggggcttctttcttcaagggatcaggccaacagcgtcacgtcatctgaatgatggtctgcatgatggtgctctgggtggagatggtcttggcgttcgcctggtagttgctctgggccttgatcaggtccaccagctcgttggtcaggttgacgttggagttctccagggagttggccacgatcgaccccagggtaccggcttgcggggtgtcgtaacccggctggcccgacgcgaaggtttctttccaggtggtgccaccggctggctgcaggccctgctcgttgttgaagctggccagggagatctggccgatggccttgctctgctggttgctgaacgtggcgaacagtacgccgctaccgtcgattttcagcccggtgatctggccggtggcgtagccatcggtgaccggtgggttgcggtaggtggccgagttgtactgggtgatgttggccatgttgacggcgatacctgttgggttcgcatccgcaccgttggccttccacacaccattggtcacggtgccaggaacccaaccggtaatggtcagggtcttgtcggagacaccaccggtgaccacactggtcagcttgccggcgccgtcaaaggtcaaggtcgatggcacaggtggggtcgatggggtgccggttggcgccgaaccattagggttgcgaccatcgatcagggtataggcattccacttattgccgtcggttttcaccaggtactgcaccatcgggtgcgcgttgccctgggagtcgtacaaggtggtgctgtactgggtggtaaaggtgctggtgtcgttcgggttgaacggcttggccacctggtcgatcaccggctccgaggagttcaggttactggtggaatccactttggtggaggccttgggcggcaggttcgacaggttcagttgcaggtcggtcaggccgcccttgatgatcttgccatcggcatctgccgcgtagccttgcaggcgcgaagtgccggtgttgttggtgatgtagccgtctttgtcggcacggaaggcaccgctgcgggtgtactccagcgaaccgtcgctgcccttctgcacgaagaagccgccaccctggatcgccatgtccaggatcccgccgctgccgttgacgtcaccttgggtgaactgctgcgacacggccgcaaggttcacaccgttgccgatgctgttctggccggtgcccagcttggacgcggcgtagatgtcggcgaattccgcacgggacgacttgaagccagtggtcgcgacgttggcgatgttgttgccggtcacgtccagttgtttgttggccgcatagaggccgctaaggccgatgttaaaagacatgtttctctccctctgccgtatttagccggctctatgtaccgatagtctgaatttgcgacagcttgacgctgcccatgccgccagccaggttcagcagcatttcgccgccggtcttgctcagggtcacgctcgttaccgtcgcgggcagcgaagtggccagggcaacggagtcgcccttgtcgttcttggtggtggcgttgaaggtgtaggtacccgccggggcaacctcgcccttgtcgttcttgccatcccagatgaagttctgggtgccggcgctctgggcccccatgtcgatggtgcgcaccacgttgccgtctttgtcggtgatcttgacggagacgttgcccaccgccgaggtcaccgccaccgaaccggtcatgctcttgctcgtatcaaccatggccttgtcggtctggatgatgatcgagcgcccgaccagcgacgaggcctgcaacgcctgcgacgaactgaagttggtggagatcgcattcaccgagtcgttcagggtgttgatgccttccaggctgctgaactgcgccagttgcgccacgaacgcgccgttgtcttgcggcgacagcgggttctggtttttcagctgggtcaccagcagttgcaggaacgcatccttgcccaacgcctgcttgcccgtcgccttattggcggcgtcgctgacgctgctgttgtcctgggcgttcttgaccttggagttgaacaggtcctggaccggcgtgttgtttgacgtatcaacgatggccattgtttggcgccccttatcactgacccagggtcaggaccttctgcatcatggttttggcggtgttcatcatttccgcgttggtctggaacgagcggctggcggaaatcatgtcagccatttcctcgaccacattgacgttggggtagtagacataacccttttcgttcgcagcgggatggttgggttcgtagcgcgcttcaaggttgctctggtcttcgaccacaccgagtacctgcacgccggagccggcggccccctggtcctggaacagcgaatcgctgccgccgttctggcctgcctggaacatggtggcgaacaccgggtgacgggcacggtaggtctggtcaatgctcgaagacacggtctcggcgttggcgatgttactggcgacggtgttcaagcgcgtggtctgcgcgctcatgccactgccggcaatattgaaaacactggacagggacatggcttactctccacgcagggctgacatcagccctttgaatttgctgttgagcagggtaaagctggcctggaagttcaccgagttctcggcgtaggccgattgctccagttgggcgtcgacggtgttctggtcgatcgacggttgcatcggcgtgcgatacagcaacgactcgtcaccattgctcaggccttgcgcttcgatatgacggctgttggtcatgttcaaggcgaaggtgccgttcttggtcttgtcctgctgtgcggcgagcacggcggagaagtccaggtcccgagccttgtagttcggggtgtcggcgttggcaatgttgttggccaggacttcggcacgctgggcgcggaagcccagggcttgttcgtggataccgagcgctttatcgaagctgatgctcatggcggaaaccttcaagggctgacctgcttttcgttaacagggttatagcaaggtgcatgccaatctggcgcaagcccgtatatcaagggttttggtaaggggttgccggcggcaatgccggaaaagcggcaagcggtttccgcgtcgcgccagtaaagcggcaatgagggttgccgctttattgcggtttgccgcaaaccaaatgtgggagggggcttgctcccgatggcagtggttcagttgatacatcgatcactgacacaccgccatcgggagcaagccccctcccacattttttaccgcacagccttatttagcctggtagatgatccccgggctgcactgcaccatctggaaatggtccggcagaccgttcagcgcctcagaagcgccaaggaacagataaccaccgcgcttgagcgtgccgtggatgcgcaacaggatgtctttcttcacttcggccgagaagtagatcagcacgttgcggcagaacaccatgtcgaacttgcccaggctggcgtagctgtcgagcaggttgaaggagcggaattccacgcggttcttgatcggcgccttgaccgcccagcgtcctgcccctttcgggtcgaagtaacgctgcaggcgctcctgggacagaccacgccccagggccaggctgtcgtactcaccggtcttgcagttggtgagcatggtgccggacagatcggtggccacaatttgcgcccccgccttcaactggcccatgttggtccgctcgaactcatcgatggacatcgaaatcgagtacggttcctgccccgaggagcaggccgccgaccagatgcgcaggcgctggcccgggctggccttgatggcctccggcagcactttgctcttgagcacttcaaacgggtaggtgtcgcgaaaccacagggtttcgttggtggtcatggcatcgaccaccatttccttgagcccgctgcgcggctggccctggatgcgctgcaccaactcacccaacgacttgatgccctgctgctccatcagtttgttgagacggctggataccaggtactgcttgttttcaccgagcaatatgccacaggctttttccaggaagacccggaactgttcaaaatccaaattacctgtagacactgataccgcctctaaaatcgtatgaccgccaagggaaacaccttagctgtgatctgctgccttgatccggtcgacaacccgggatgccaggtcatcaggacggaatttggccaaaaagtcatcggcaccgaccttcttgaccatcgcctggttgaatacacccgacaacgaagtatgcaggatgatatgcaatttttgcatgcgtggatcgttgcggatctcggccgtgagggtatagccgtccatttccggcatctcgatgtcggaaatcatcatcaagaattcttcttccggcttcttgccgtcatccaccagcttgcgcaggtagtccagcgcctggcgcccatcattgagggcgaccacttcaacgccgacggtttgcaggcaccgggtcacctgcttgcgcgccacggacgagtcgtccaccgtgagcacgcgcagtgagactgccttgtgcgcggtttcggcgtccaccacacccaccgagatcgactcggaggtaggtgccacttcggcgagaattttctcgacgtcgatgatttccaccaactggttgtcgacccgcgtcaccgccgtaaggtaatgatcgcgccccgtgcccttgggcggcggatggatctcttcccagttcatgttgacgatgcgctccaccgaacgcaccaggaaaccctgggtcttggtgttgtactcggtaatgatcacgaacgggctttcgcggtcctgcaaaccggcggaaccggtggccagggccagatcaagaatcgggatcgtcgcgccacgaatgttggcaacgccacacactaccgggctggacttgggcatgatcgtcagcttggggcattgcagcacttcccgcaccttgaacacgttgatgccatacagctgcttgccatccaggcgaaaaagcaacaactccaggcgattctgccccaccagctgtgtgcgctggtttactgaatccattactcctgccatgccttgactcccacgctaaaaccttcggccatacctataagggcagtgacgcgcacccaacactaaacggcacgagctttgctatttattggtcatggatattaaaacgacagtttcccgacgcctccacctgacacggtattgcagactgctctgcgcaccgctggcactgcttgccttgggcctgggcgccacggcccgcgcagataacgtcaccttgcctgatctacttatcggcgtcacccagggctttcttgagttcactgtagaagattatctggcgaccacccagacgccggggcgttatgaaatccaggtcaaccagttggacccgcgcctgcgcatgcccatgtgcgacaaggaattgacagccaccctggaaagccccgcccaacccatcggtcgcgtaacggtgaaggtgcgctgcgacggcgcctcgccctggacggtgttcgtgcccgcccaggtcaaattgttccgcgatgtggtggtggttgcccgcccacttaaacgcacgggcattatcggttttgaggacgtggtgctgcgcgaacgcgacatcagcatgatcagccagggctacttgacctccctcgaccaggccgtcgggcagaaactgacccgaccagtggtcaccgatcaggtcatcaccctggtgcacctggagcaggccgaggtgattcgcaaaggtgaccaggtagtgatttccgccagcagtggcgcgctgcaggtcaaaatgccgggggaagccttgtccaacggcggcatgagcgaacagatccgcgtgaagaatctcaactccaaccgtgtgatcaaggcgcgagtcacggcccccggccaagtggaggtggctttatagaccactggtatcagacgccagcttttcctacactgtcggttggatgccggccggtgcagtttattgtcattcgagcctaaagtttgtccggatatggccgaaaacatggcaagcgtccaaatacccagaggttttttgatcatggtcatcgatttcagccgtttaaatagcaccccgacaacgtcggctcctacgcgcactgtcggcaccaaggacagcgtagaagccaaggctcagccactgcccgccaaggcagaacaggccagcgccagccagagcggggaatccgtacacctgagcaatgaggctcaacagttgcagaaggtcactgactcgctgcgcgatcaaccggtggtcaataaagcccgtgtggccgaattgaaacaggcaatcgccgatggcagctataaagtcgacagcaaccgtgtagccagcaagctgcttaatttcgaagccgagcgctaggcaaaggcctgcgccgggcttttggacgcttaaaccccaaggccagccatgcatcacgacgaaaccctgcttcaactgatcattgatgatctagcaccgacgcaattgctgctcgagctgctcagggaagaatccctggccctttacggccgggacatgcccctgctggaagaaattctggcgcgcaagcaatcgctgattgtcctgctggaacagcacggcaaaaaacgcagcgagatcctcgtcagcctgggcctgcccgccgaccatgatggcctcgcgcagctggccagccactcctcggtcggcgatcaactactggcccagagcaaagaactcaacctattgctcacccagtgccaggaagccaaccaactcaacggtcagtcgatccagcttcagcaagccacgaccgccaaccagttgcgtatacttcacggcggagagcctccagcgctttacaacgctcagggttccacctcgcgcctggtcaagccaagcacccgcagccaagcctgacgccggtttacagcgcggcctatccaaggcgcgccacatactggcagaatgcccgctcttgcgtgtagtcgtattttgtctggagatggaagaaccgtgttcaacgcccttaatgcggaagatgccccgcagccacccaaggtcctcaccacgcctctggaaatcgccagtaccttgcgcatgctgcaagatagccatgacccgctgatcattaccttccacgaacgcagccagcgcttccagagctacctggtggacgtcagccgggacaacggcaccctggccctggatgaaatgatcccccgcgacggtgaacgctacctcgaaaatggcgaacccttccgtatcgaaggtttccacgacggcgtacgcgttgcctgggaaagcaacggcaacctgagcatcagcgagaaggacggccaccgcatctacaccggcagcctgcccgacgaagtggtctaccaccagcgtcgcaatgcctttcgcgctgccctgaagctggcgcaactggtgaacatcgaattgggtggcgagaagctcaaggccccgatcagcggcaagctgctggatatttccgccacaggttgcaaattgcgctttgagggagacatctccgagcgtctgcagttaggccaggtctacgaccgctttatcgccgccctgcccttcggcagcatgaccacctcggttgaactgcgttacctgcactttgaagagaagatcaacaccacgtttgccggcgtgcgcttccacaacatgagtggtctggtgcagcgtcaggtcgagcgctttgtctaccagttacaacgcgaagcacgacgtttcgataaagacgacgatttttaaactcaaagatcgcggcaaaaaaacgggcagaccctgatgggatctgcccgtttttgtattcaggggcgcgccctgctcaagtcatgaggatgctcgtccgggcccggcggctcaggcggcccctcaaagagcggctcgtcgaccgatgtgaccgtttccggatcgggttccggcgcggcggtttgcatttgctcctgcaccaccgcctcgtccacccgtggatcgaggcaggctaccaacggcgagctggacatgctgtcgggcattgccacgtggtgcagcggcgcgtcatccacctgatgcaggttggtcacggctttcggccgaatccgccacaccaggatcagcgcacacaggctgaaaaacgcatacagcatgtgactgccaaacaccttcatcaccacaccggccagcaacggcccgatactcgcaccgacaccgtaggtcaccagcagcatggcggtgagcgagacacggcggtcgccttccacatgatcattggagaacgccaccgccagcgggtacaaacagaactgcaccagagaacacacgaagcccgccacgaacagtacttccagcggcaccttggtcagtaatgccagcggcagcgccgccactgccaggcacagggcaaagcaacgaatcagcagcgcgcgatcatagcggtccgacaaccagcccaacggccactgcaccagcaggccggcaaaaatacaactgcccatgaacagacccacctgttcggtagacagcccttgctgggaggcatagagcggcgccaggccatagaacgagcccacgatcacccctgcccccagcaccgtactcaacgactgcgggacgcgcttgataaagaagcgtggctccatcggcgccggatgcaggggcgccgggtgaatacggcgagtcattgccaccggcaccaggcacagcgcaaagcacagtgcgaccagcatcagcaattcgaggccgagctgagggtgcatgaccaggatcaactggccgagcaccagccccaggtaggacgcgatcatataaccgctgaacaccacgccgcgctgcttggcgtcggcctgttcattgagccagctctcgatgaccatgtactggcacatcatccccaggcccacgatcatccgcagcacaatccaggccggcagccagtcgatcagaccatgccccagcaccgccgcgccgacaatgccagcgcaggttgcataagcacgaatatgcccgacccgggcgatcaggcggtgcccgatcttgccgcccagcaccaggccaaaatagttggccgccatcagcgcaccgacccacaggctatccacatggtcggccgccaggcgcaaggccaggtaggtactgagcaggccggagccaatcagcatcatcaaggaggcgaaataaagggctcgaaaagatttccagatctggcgcatcggcgttccgagcggctccttgcagtgagagacaggcctatcggcatgatagtccggggtgaccgggtccggacaggcaacttgcgctgtttccggggattattttgcttaaaggctcagacgctgcccgaccgcttgtgaggtacaccgattgtgaaaaatgcacgcacacgtgctgtgaacgctgaacaccggcaaggttcgacccgtctttgaaaggcgcccacaaaaaagccctgccagaacagtctgtgcagggctttgaatctggtgtcccagggccggttcgaacggccaaccttccccttaggagggggatgctctatccaattgagctactgggacaaatgacagccgctacactgggacgcggcgacagacggcgtgcatgttaacggccagggtaggttttgtcatgtcgtccgtaggctttttgagtgtaggccgatacttgcctgattgatcgtgtttcaaccccggcgacgcgggcgcacgggctgtatcgtgcaaaatgcactccctcaaaatgccatcattgcaaattgcaacctaaaagccattaaaaccatcggtaagtatctgattttattgaattaatagattggcacgacacctgcaatacttctcctacaaccccaataagcctcggcgttaaacggagaacataatcatgaacagtgcccttctgttagccctgaacaccgtcgccctggccgcgttggtcatgtttcattttcaatccaccggtagcaacgaccctgcgcagatcagccaggccatcccccaccatttgcaacaacgcccgcaactggcagtgatgactccgaatgcgcaatcgccggtacgcctgacccaagacacccaagcggcacctgctactgaacactgggtattctgaggaagccgctgatgaataaatatgcctggctgttcctgtgcctgaccgttgccacagcggttctgggtttgggtgcggaatctcaagacggcacaaccaccgctttcattgccagcggtgtattcgccagcctcttattgctgacgctcatcgtcggtcgtcgcatcaaattcgaccctgtcctgcgctaatcccctctgcgcccgaccttatgtcgcctgaccctcgcatatcggcaaattgccactagtcttaaagctaagggcaaagggccactttgctataggatgtgcggcctgaaaccctgtagtggcccgggcttgcgggaagttccctcgcggattcacgcggtgaaaaattttccaaccagtccgcaaaaatgcaaatgagtgctggcataaagcctttaggcagttcaatatttgtcacagaattgacgccaaggaactgtcaaatctgaggcatgatgcggcctctttgcaattcaggttgaactttggtcgtgagccttgtcttaacactcatcttgcggccaattccaaaaaccgctcccctgaactaaccggttaaatatatgcgcccattgaaacaggcaatttattccagccgtacggctgacaagttcgtcgtacgtctgccagacggaatgcgggaacgcattgccgaggtggctcgcaatcatcaccgcagcatgaactccgaaatcatcgctcgcctggaacaaagcctcattcaggaaggtgcgctgggcgacgagttgagcatgcgcctggacagcccagagctgtcgttgcacgaacgcgaactgctgcagcgttttcgtcagctctcccaccgccagcaaaatgctctcgtctcgcttatcgcgcacgacgttgaggcggccgcagaagccaattgatctgcaactgaaagccgaagccagccatgtgctggcttttttttgcctgggatttgggaagagaatgcaaggcgggagcagatacgctcccgccggatggaatcaaagtagaaagatcgtcgccagacccaggaagatgaagaagccaccactgtcggtcatggccgtgatcatcacactggcccccatggcagggtcacgcccaagacgagccagggtcatcgggatcaatacgcccatcagcgccgccagcagcaggttgagggtcatcgcagccgtcatcaccacccccagcgaccaactgccatacagcaagtaagccaccacaccgatcaccccaccccacacaagaccgttgatgaggccaaccgccagctccttacgcagcaaacgcgatgaattggcggtactcacctgatccagcgccatggcgcgcacgatcatggtaatcgtctggttacccgagtttccgccgatcccggccacaatcggcatcagtgctgcaagcgccaccaacttctcgatcgacccttcgaacaagccaataacccgcgaagcgataaaggctgtgatcaggttgatggccaaccacgcccaacggttatgcagcgagcgccaaaccgaggcaaagatatcttcctcttcacgcagacccgccatgttgaggacttcggtctcgctttcttcacgaatcaagtcgacgatttcatcgatggtcagacgaccaatcagtttgccgttcttgtcgacaaccggcgccgagatcaggtcgtaacgctcgaatgcctgggccgcgtcgtaagcgtcctcgtccggatgaaagctcacggtgtcgctggccatcaggtcggcaactttcttctccggatcattgaccagcaggcgcttgatcggcagcacgcctttgagaatgccttcgtaatccaccacgaacaatttgtcggtgtgacctggcagctctttgagtcggcgcaggtaacgcagcaccacttccaggctgacgtcttcacggatggtgaccatctcgaagtccatcagggcgccgacctggtcctcgtcataggacagcgcggagcgcacacgctcacgctgctgagtatccaacgcttccatgagctcatggacaacatcacgaggcagctcaggggccaggtcggccagttcgtcggcgtccatctccttggctgcagccaggagttcgtgatcgtccatgtcggcgatcagggtttcacgaaccgagtcggacacttcgaggaggatgtcgccgtcgcggtcagccttgaccaactgccatagggtcagtcgatcatccagcggcaaggcttcgagaatataggcgacgtcggcggagtgcaggtcgtcaagcttgcgctgcagctcgacgaggttttgccggtgaaccaggttttcaaccaggttgttattcgggccatcctggcggtgcgtaaggtcttcgaccacacgctggcgctgcagcagctcaatgacttgagccaggcgatcctgcaggctttcttgtgttttctttacttctacttcggtcataggcgaactccactcccagcagcggggcacgccggaaggatcaatcagtcaattcatgattggtaaaacggggtactgagtaactactgggtaagtccatggaggtattccacaagccccggcggggctgacgggcgcaatgatacaccgcccggccactttaaacgtcaaaaaactggaaagaacaagcgcttgcgagccaaagctgagcaacggccgcatctatgaactgcgacgacgcagcggatgaggaaaacacatgaaggcgagagaaaaagaacaaatcccacacaaaccccagacggcaaaaagcccgcactaggcgggctttttgtttgtatggtgcactcgacaggattcgaacctgtgaccgctcggttcgtagccgagtactctatccagctgagctacgagtgcagattgtgtttttagaccagatcacaactggttgtaaccgaatcacctgcattgctgcaactgactcttaaatggtgcactcgacaggattcgaacctgtgaccgctcggttcgtagccgagtactctatccagctgagctacgagtgcatttgttgccgcgcattataggccgttcaatctctatgtaaagctattttttcgagtaatttcaacaacttaccgaaaaaaccagattgcaacgtactaagcaaataatggcggagaacgggggattcgaacccccgacacccttttgaggtgtactcccttagcaggggagcgccttcggccactcggccagctctccgcaacacggggcgtatattaaccacgttcatccccgtttgcaaacataaaaaacgataaaaattaaaggcttggttcttcgtccttctctttcttgatccgcaggtagatttcctcgcggtgcaccgctacctctttcggagcgttaaccccgatacgcacttgattgcctttgacgccgagcacggtcacggtgatttcgccatcaccgataatcaggctttctgcgcaacgacgagtcagaatcagcatacctttctcctcacgcatttcagttcaggaacaacagtctgcaaaaaaaaggccttcgacctacaacccaaaggccatagccctaccgcctaagtattgtcgagcgcgcgcaaaagaacatgcgccctacaaaaaaaggaaaggcgcggtaaaccgcgccttccaggcactgcgtcactcgccctgtcgggccggagcgtccagctcaaaagcggtatgcagagcgcgtacagccagctccaggtacttctcttcgatcaccaccgagactttgatttccgaggtggaaatcatctggatgttgatgctttccttggccagggcctcgaacatgcggctggcaacgccagcatgggaacgcatgcccacgcccacgatcgacaccttggcaatcttggtatcgccaaccacctcgcgggcgccgatttccttggcagtgttctgcaggatccgctcggccgcatcgtactcgttgcggtgcacagtgaaggtgaaatcggtggtgttatcgtgcgaaacgttctgcacgatcatgtcgacttcgatgttcgcaccgctgataggacccaggatcttgaacgccacgcccggggtatccggcacgccacggatagtcagcttggcttcatcacggttgaaagcgataccggaaatgatcggctgttccatggattcctcttcatcaatagtaatgagggtgcccggaccctctttgaagctgtgcaatacgcgcagcggaacgttgtacttgccggcgaattccaccgcacggatctgcaacaccttggaaccgaggctggccatttccagcatctcttcaaaggtgatcttgtccaggcgctgggccacggacaccacacgcgggtcggtggtgtagacgccatccacatcggtgtagatctggcattcatcagccttgagggccgctgccagcgccacgccggtggtgtccgaaccgccacgcccgagggtggtgatgttgccctgctcgtccacaccctggaagcctgctacaactaccacgcgcccggctttcaggtccgtacggattttctgatcgtcaatctgcaggatacgcgccttggtatgcgcgctatcggtgaggatgcgcacctggctgccagtgtaggacaccgccggcacaccgcgtttattcaacgccatggccagcaacgcgatagtcacctgctcgccggtggacacgatcacatccagctcacgcggcagcggctgttgatcaccactgattgccttggccagatcgatcaggcgattggtctcgccgctcatggccgacagcaccaccaccaggtcgtcgccggcatcgcggaacttcttaaccttgtcggccacctgctcgattctttcgacagagccgaccgaggtgcctccaaatttctgtacgatcaaagccatttctaagccgcctcagcccgtaaaggggcgcctaatatccaatcaaccagcaccacaccggcccgtgactagaccacgggccggttaacagtgccttaaatacctgcctcgacaaacggcacggtcagggccagggccgcgtccaggctgccggcgtctacaccaccgccttgcgccatgtccggacgaccaccacccttcccgcccactgccgcggcggcttgcttcatcaaatcaccggctttgagttggccagtcaggtccttggtcacacctgcaaccagcacgaccttatcctcatggacaccgccgagcaggatcactgcgcggccgagcttgttcttcaactgatcgaccaaggccaacagcgccttgccgtcctggccgtccaggcgtgcagccaggactttgacgtccttgacgtccaccgccgaagccgacaggtcgtcgccggccgcactggccgccttggcctgcaactgctccagctgtttctccagggcgcggttgcgctccagcacagcggacagcttgtcgatcagattgtcgcggctgcccttgaccaggctggccgcttccttgagttgttcttccgccgcattcaggtaggccagggccgcagcgccggtcaccgcttcgatacgacgcacaccggaggccacgccgccttcgctgatgattttcagcagggcgatgtcgccggtacggttggcgtggataccgccacacagctccaccgagaagtcaccgcccatgctcagtacacgcacgctgtcgccgtacttctcgccgaacagcgccatggcgcccttggccttggcggtctcgatatcggtttcttcggtttctaccgcggtgttcttgcgaatctcggcgttgacgatgtcttccagggccttgatctgctcaggcttgatcgcttcaaagtggctgaagtcgaaacgcaggcgctggctgtctaccaaagaacccttctgctgcacgtgctcacccagaacctggcgcagcgcggcgtgcagcaagtgcgtggccgagtggttcagcgaagtggcatgacgcacatcagcgtccacctgggcatcgaccggcgcacccacggtcaggctgcccgaagccaacacaccgtggtgcaggaacgcaccgccggtcttggtggtgtcacgcacatcaaaacgaccggaagccgccttgaggaaaccgcagtcgccaatctggccaccggactcggcgtagaacggggtctggtccagaaccacaacaccgtcatcgccttcattcagtacatcaaccgactggccgtccttatacagggcgaccactttggccgagccgctggtggccttgtaaccggtgaattcagtggctacgtcaaccttgaccaggctgttgtagtccatgccgaacgagctggccgaacgtgcacgcacgcgctgggcttccatctcgcgctcgaaaccttcctcgtcgagggtcaggttgcgctcacgggcgatgtcgccagtcaggtccatcgggaaaccgtaggtatcgtagagcttgaacaccacgtcacccggcaccacggagccttgcaggttggcgaggtcttgctcgaggatcttcaggccctgctcaagggtcttggcgaactgctcttcttcagctttgagcacgcgctcgatgtgcgcctggttctgcttgagttccgggaaggcttcgcccatctcggccaccagggccgcgacgatctgatagaagaaactgccgttggcacccagcttgttaccgtgacggcaagcacgacggatgatgcgacgcagcacgtagccacggccttcgttggacggcagcacaccgtcggcaatcaggaagccacaggaacggatgtggtcggccacaaccttgagggaagcctggtcttcattggtgcaaccaatggccttggccgcagcggccagcaggctctggaacaggtcgatctcgtagttggagtgcacgtgctgcatcaccgcactgatccgctccaggcccatgccggtgtccaccgacggcgctggcaacggatgcaacacgccatcggcggtgcggttgaactgcatgaacacgttgttccagatctcgatgtaacggtcgccgtcttcttctggcgagcccggtgggccgccccagatgtcagcgccgtggtcgtagaagatctcggtgcaagggccgcacggaccggtatcgcccatggtccagaagttgtcggaggcgtacggtgcgcctttgttgtcgccgatgcgcaccatgcgctcagccggcacgccgacttccttggtccagatgtcatacgcttcgtcatcgctggcgtagacggtgacccagagtttttccttcggcagtttcagcacgccagtcaggaaggtccaggcgaagttgatcgcgtcttgcttgaaataatcgccaaagctgaagttgccgagcatttcgaaaaaagtgtggtgacgggcggtatagcctacgttttccaggtcgttgtgcttgccaccggcgcgtacgcatttctggctgctgactgcgcgggtgtacgcgcgcttttcctggcccaggaagcagtccttgaactggttcatccccgcgttagtgaacagcagggtagggtcattgcctgggatcaaggagctggaggagacacgggtgtgaccttgctcttcgaagaagcgaaggaaggcttcacggatttctgcgcttttcattaggttcttccacggaggctgcggccaaaggccagtgcgcaacatcatcagacgaagcgacggcaaagggccgcattatatcggccctttgccggtggtacagcgtgtttatgcgatagagaggctcaattagacggtctgcacagtcatttgcgcgaaaagtcgacgaatgtcgcgagcacttgctcgacctgcgcccggctcacatccaaatgagtgaccatgcgcaggcgcggtgcggcgctcagcttgatcccgcgttcggcggcaaacgccttcaaagcctgggcctgatcaccgatctgcacatagaccatgttggtctgcaccggctccacctcataacccgccttgcgcaactccccccccagccattgggcattggcgtggtcgtcggccaggcgctgcacctggtgatccagggcatacaaccctgcagcagccagggaaccggcctggcgcatgccgccaccgaccatcttgcgcaggcgccgggccttggcgatcagcgccgtggaaccgcacaacaccgagccgacaggcgcaccgaggcctttggacaggcacaccgacactgaatcgaagtgctgcgcgatctcccgtgcatccacccccagctttaccgctgcgttgtagagcctggcaccatccagatgcagggccaggccatgctcccgggtaaacgcgcgggctttggccaggtactccagcggcagcaccttgccctgcatggtgttttccaacgccaacagacgggtacgggcgaagtggaaatcgtctggcttgatggctgccagcacctggtccaggtccagtgagccatccgcctgcacttccagcggctgcggctggatcgagccgagcactgcggcaccaccaccctcgtatttgtaggtatgggcctgctggccgacgatgtactcctcgccgcgctcacagtgggccatcaacgccagcaggttgctcatggtgccggtgggcacgaacaacgccgcggcaaagcccaggcgcttggccagttcggcctccagccggttgacgctggggtcttcgccatacacgtcatcaccgctggcggcagtggccatcgcgtcgagcatgccgggggtgggttgggtcacggtgtcgctgcgcaggtcgatcacagacatgaaacaagcctctcgagggttcagtaagtgccttttgtgagtgattactgcgggcaacgccacggaatatcaagccccaactgcattcaatcgaataccaaccaaacaaaccgatatagcttatcgataccgcggtcgtgcagttttcgaaaaaccgtgttaaaaactctccgccgccagggttctggcggcaacgttctcagggcggggtgcaattccccaccggcggtaattacacgcaatgtgtatagcccgcgagcgcttggcgcctcgaactgctcacgtaggacggcgacaaggtcagcagacccggtgtgatcccggggccgacggtcatagtccggatgaagagagaacgggattggcacctgagggccgcgcacgatgtgtgctcgcgtacccttaaatcccattcgattcataacgccctgtttttttcttaaacaggagtcagaacatgcaacccaccgcaatcgacagcaaagccaagcaccaccacggcgaacgtatcgcgtttatccaggcttgctggcacaaggaaattgtcgaccagagccgtaaaggcttcctcgccgagatcatcgcccagggctaccaggaatcggacatcgatttcttcgaagtcggcggcgcctttgaaatgcccctgcacgccaagctgctggccaagaccggccgttacgccggtatcgtcgccgccgcgctggtagtggacggtggcatctaccgccacgaattcgtcgcccaatcggtggtcagcggcctgatgcaggtgcagctggaaaccgaagtgccggtgttctcggtgtccctgaccccgcatcacttccacgccggcagcgaacaccagaccttcttctacgagcacttcgtgcacaaaggccaggaagcagcacgcacctgcgccgacaccttgcacaaagtccgcgcgattcgccgtagcgagccacgcgcggtagcagtctaagcaacacggcaaagtacaaggtgggagggggcttgctcccgatggcagtgtgtcagtcacttaattgtcaactgacccaccgctatcgggggcaagccccctcccacatttggatcggatgaggctttgagcttcaggccaagccgacgtccgtcgtcggcacaatcaatatccccgcccgcaaaccattcttcaccttcgggttggggaagatgatgcgcgcgccctcctcctcgatcacccagcgggtcttggccacgtcttcggccagcagatagccctgggccaacggcgagaagttttccacatccgccggcaggtgcagcaggaaggcgtcgctgtgcttgatgacttcacgggagacggcaaacagttgcaggccgtcgaggctgctggtcggcggctcggtgccttcgatgatctgcttgaggcgtgtttccaggcgggacacgtccacgccctggttttgcccgaacggccgcgccttgcccaattccagggtgaacgcctcggcatcgagttgttcgtaggtaaacgcggtgaacgtgatcgaggtcttgttctgcaacagcaccgcttgcatgccggcagcgttcaggcgcgccagttcatggcgtgaatgctggcgaccttccttccatgggtacagggcgaactgctcgatcttcgagccgcgaatggccgtgtgcaggtcgtaatgcaggcgtgaacggcccggcaggctgaaaaaactgcgggccagttgctccagctcggcggcgcgcatggcctccggaccaatgtttttttcatgccgaccgttgaacagccggttgacgtccagttcgaggtaacgctcgccgcggcgcatggcctcggggttgccgaacaggaacagaatacgggtacggggcttgatctccccacgggcaatgccatgcaacaggcggtcgagcagttcgatcggcgcggtttcgttgccatggatgccggacgacagcagcaggtcgctgccgttgtccttcgcctcaggcgggcgcacttcgagtgcgccctcgctgagccagcgcatctgcacgccgtcgacagtcagttgaattttttgcgccggttcgcgaccggcgagggtcagttcaagcagtttgccaagggcgagcatacgcagcttccttagtggttgcagcctgggccgtggacgtgatcgtcgtcatcaccttcaacatcggccggttccatttccagttgcaggctcatcaggttggtggccaatgggcgcatcagcaggttggcatattcggcgtcgccctcttccacgtccacgccgatcagcagttggccacggccgtcgtgctggatccagatttccttgccctgccagaccacggcgacgcgggtgcaggaagtttccagctgggtgccgtcggtgtcttcaagaatcagtttcagggtgtcggtggtcataatagatagttctcagccgtacggcgttaattgatctggaaaggataaaccgcgcccagtttaaggatttgcgtcagttcatccagtgccgtccggcactcaagcagcaattgcgggtcagccaggtcgctttcgcgcaggctgtcgcggtagtgcttgccgacccactgggtcagggtgtcgtacaacggcgcggtcatgataacgcctggattcaccgccgccagctccgtttcgttcaacgctacgcgcaaacgcaggcacgccgggccgccaccgttctgcatgctttgcttgaggtcgaacaccttcacctcgcggatcaggccaccggcagcggtcaggttttgcagatactgccagacgcgttcattggcgcggcattcttccggcacgatcagcagcatcgaaccatcggcgcggctcagcagttggctgttgaacaggtatgaacgtaccgcgtcctcgacgctgacctgggcgcggggcacgcacaccgactggaagttaccccccagcttggccaacttgccttgcagctcgccgagcatctgttcggtattgaggaacgcgtcttcgtggtagaacagcacttcgccgttacccaccgcgatcacgtcgttgtggaataccccggcatcgatcaccgccgggttctgctgggcatagaccacaccgtcatcctgcaaaccgtgcaaacgcgcgacggcctgggaggcttcgagggtctggcgcgccgggtacttctgcggcgccgggtagcgggggtcgaacgcgctgcgaccgaacacgaaaaactcgacacccgcctcaccgtactcacggcagaaacgcgtgtggttggccgcgccttcatcgccgaactgcgccacggcgggcaacgcggcgtgatgggcgaagtgcttctgatcagcgaacatcgcccccagcacacgactggtggtcgggtgctcgatgctgcggtggtacttgcaattgaggttggcggcagtgaaatgcacgcggccatccgccgtatcggcgctcgggctgacggtggcggcgttggccacccacatgctcgacgccgagcagctcgcgaccagcaacggcatagcgtctttggccgcctgctggatcacttgcgcgtcggtgccgctgaaacccaggttgcgcaaggcggccacgtcaggacgttcctggggcgccaacacaccttgtacaaagcccatgtccatcagggctttcattttctgcaggccctgcaacgctgcttccttcgggttggaatgctgctggctgttgctctgggacgcgacgttgccgaaggacaaaccgccgtagttatgggtcggccccactagaccgtcaaaattgacttcataggatttcatcggcgaggctccacgaacatctgtttttataagcaatcttcagtactacagagatccaatgtgggagggggcaagccccctcccacctttaaatcagtgtgatgccgggggtcagcgtggcaggcaccaccaggctcggggtctcaagcgaggccaccgggtacgcacaataatccgccgcgtaataggcgctggcgcgatggttgcccgacgcccctaccccgccgaacggcgcggtactcgcggcgccggtcagttgtttgttccagttgacgataccggcacgactttccagccagaactgctggtagcgcgcttcggaatccgacaacaagcccgcggccaggccgtactgggtgttgttggcctcggcaatcgccgctgcaaagtcagcgtagcggatcacctgcaacaaggggccgaacagttcttcgtcttcacgctcggtcacaccggtcacgtcgatgatgcccggcgtgagcaacgcggcctgatcctgtggctgggtcatctccaacagcgccaccgcaccgttggccaacatcaattcctgggcgtccatcaaggctttggcggcgccgagggaaatcaccgagcccatgaacggcgctggttgctggtcaaacgcaccgacctcgatggtcgcgctgaccgccaccaggcgcgccagcaacgcatcgccccaggcaccttcgggcaccaacaggcgacgggcacaggtgcaacgttggccggcggagataaacgccgactggatgatggtgtagaccgccgcatccacatcggccacttcatcgaccaccagcgggttattgccgcccatctccagcgcgagaatcttgtccgggcgcccggagaattgctggtgcagatgattgccggtgcggctggagccagtgaagaacaacccgtcgatgcctgggttggccgccagggcgatgccggtttcccgcgcgccttgcagcaggttcagcacgcccgccggcaggccggcttcgatccagcactgcacagtcagctcagcgactttaggggtcagctcgctcggtttgaacagcacagtgttacccgccagcaaggccggaacgatatgcccgttcggcaagtggccggggaagttgtaagggccgaacaccgccaccacaccgtggggtttgtggcgcaatacggcggtggcatcgcccagcgagccgctcttctcgccggtgcgctcgcggtagctttgtaccgagatcgcgatcttgttggccatgctggtgacttcggtcgctgactcccacagcggcttgccggtttcctcaccaatgcagcgtgcgatttcgtcggcgcgttttttcagggtggcggtgaaggtctccagtacgccgatgcgctcttccagcgaacgtctggcccaggaggggaaagcctgacgcgcggcctgcacggcggactcgacctgttcggcggtggcgccattaccggcccacagcacctgctgggtcaccgggttgcgcgattcaaacagctcaccctggccagccagccagctacctgcgatgtacagcgaattcattatttcgactcccgagcagcggacaacggtacggcacgcacttgatcgcccaccaccaaacgcaggcgcttggcggtctgcgggtcgaccaccagggttccggctgcgaggcgggccggggcggcggtgatgcggcaatcttcgcgtttgcggttatggatcaggaacggcgtggcgtcgtcgcctggggtgccgatcgccaataccagtgtttcgctgtcgcgaacggcacggatcttctgggtctcacactccaccgcaggtcccgcgtcgaaaatatcgacgtagccctggtagctgaagccttcactcttgagcatgctcaacgccggttcggtatccgggtggaccttgccgatcacgttgcgcgcatcttcggaaaggaagcagctatacaacggaaacttcggcatcaactcggcgataaacgccttgttgcccacaccggtgaggtaatcggcctggctgaattccatcttgaagaagtgccggcccaggctttcccagaacggcgaacgcccggcgtcgttggacaccccgcgcatctcagcgatgatcttgttaccgaacaactgcgggaattcggcaatgaacagcaggcgcgccttggccagcatgcggccgttgaggccgctgcggtaatcggcgtgcaggaacaacgagcacagttcggaattgccggtgaggtcgttggccaggaacagcgtcggaatctcacggtagatgttcagctcctgggaggcgctgacggtcaagccaacccggaagttgtaccaaggctcacgcaagccgacggcgccggcgatggcggaaatgcccaccactcgaccctcgtcgttttccagcacgaacaggtagtcggcatcgccgcgcccggcgtcgccgcgaaaggttttttcggcccagcccacgcggtgggtcaggcgctcttcgttggccggcaaggtggtgaggccggtgccggtgctgcgcgccagatcaatcagggccggtaaatcgctgctgcgtacgggacgaacgatcatgctatctcctcgaacgggccgctgttgtcagccacccgcgaaactctctttttaaaccgctaccaggcgcacgctcgcaccttcgccaacacccagggcctcggccgctgccaggtccaacgtcaccggtttacccggcgcgtagtccagctccagcatcaccgcgcggtagtcctgcaattgcgcgttgctcaccaggtactggcgaccgacgcccttgaccatctcgccgatcttcaccggcactacgcggctctgggcgatcgagcgaatgcccgagacccgtgcgtgcagcgtcgggccgccgtcgaaaatatcgatgtaatggtcggtctcgaagccttcgcgcatcaggatgtcgaaggtgatctgcgcacgcgggtgcacctggcccatggcttcctgggcttcgtccggcagcagcggcacgtagatcgggtaatgcggcatcagctcggcgaggaaggtgcggcttttcagcccgcacagacgctcggcggcggcgtagttgaggtcgaagaagttgcggccgatggcgtcccagaatggcgagtcaccgttctcgtcgctgtagccgacgatctcggtcaccaccgagtcggcaaagcgctcgggatggctggcgacgaacagcaggcggccacgggaattgagttccgaccacggcgaaccgaccagctcgggcaccacgtagaaactggtgagcaggctgttgccggtgaggtcgtggcactgggaaagcacgtggatcttgttgtggatcttcagctcgcgggaagcgtgcacgaaggtctcgttacggaagctgtagaacggctcggagtaaccggccgacgcgacaatggccgagcagccggcgagcttgccggtctcggtgtcttcaagcacgaagaaatagctttcttcaccgttgaagctcacctcggcggcgaaagacgcttcgctcgcggcgatcttgtcgctcaggcgttccacgtcgtccggcaaggaggtgacaccaatcgggctgtccgcagccagacgctgtacctcgcccagatcagccatttgcgcggggcgcatcaccagcatggtgtcactccttaactcgaaaaactcataggaaaaaataccggacagttcctgattcaacgcaggtcaaatgtgggagggggcttgcccccgatagcagtctgtcagttgataaatcaggtggctgacccatcgctatcggggggcaagccccctcccacatgacacggtccggcaaataagggtgtatcaggcttgcgtcagcgtttttactgcacgttcaaaacggtccaggccttcctggatgtccgcgtcttccaccaccaggctcggcgcaaaacgcaccacgtcggggccggcctgcaggatcatcaggttttctttctcggccgcgttgaacacgtccttggccttgcctttgaacgcatcgctcagtacgcaaccgagcaacaggcccatgccgcgcacttcggtgaagatgccgtattgcttgccgatctgctccaggcgcgccttgaacagctcgtgcttggcattcacgccagccagcacctcaggggtgttgatcacgtcgatcaccgcttcggccaccgcgcacgccagcgggttgccgccgtaggtggtgccgtgggtgccgaccaccaggtgcttggccaggtcttcgcgagtgagcatggctgcaatcgggaaaccgccgcccaggctcttggcgctggtgaggatgtccggcaccacgccgtagtgctggtaggcgaacaggtggccgctgcggcccatgccggtctgtacttcgtcgaacaccagcaaggcgttgttggcgtcacacagctcacgagcaccttgcaggtaggccagttcggccggcagtacgccgccttcgccctggatcggctccagcaccacggcgcaggtcttgtccgacaccgcggctttcagcgcggccaagtcgttataaggaacgtgggtgatcccggtgattttagggccgaagccatcggagtacttggactggccaccgacgttgacggtaaacagcgtgcggccgtggaagctgttcagcgcggcgatgatctcgtacttctcggtgccgaaacggtcgaacgcgacacgacgggccagcttgaacgcggcctcgttggcttcggcgccggagttgcagaagaacacacgctcggcaaaggtggcgtcgatcagcttatgcgccaggcgcagggccggctcattggtgaacacgttggacacgtgccacagcttgttggcctgttcggtcagtgcaccgaccagcgccgggtgggcgtggcccaatacgttgaccgcgatgccgccggcaaagtcgatcagctcgcgaccagcctggtcccacacgcgcgaacctgcgccacgcacggggatgaaggcggcaggtgcgtagttgggaaccatgacctggtcgaaatcggcacgttgcaccggggcttgctcaacggacatcggagtctcctgaagaggaacgcctgcctggaactggcgggcgatgcagggattgtaaggacagttttcagtagggccttgtcgccaagcgacaacttcttatagcgccaacccgcgttttacgcgggtttacgccaatgcgacaaatagcatcgcaatggcgcagtttaaacgctgcgcgccgtttgcgtgagggccagacgtgccggcggcataactatctaaagtccggcatgccggggcggctgatttactcgtggtttcgagcccctcatggatccgagcatgacaaccccgacttctcctgtaccggcagtcagcgataacagccgccccgaccaagactttgaaccattgaccggcgccctgcccggctggctgctcagcgcgtccgtgcgccagcgcgaggcgttcaaaaaagctgcgcccctgcctttacccaccgccaacgccgcgcagcaagccgccttcaaacagctgaacggtgcacattggcaagcccagagacgcgtcgacaacgcgctcaaggatctcaaggatcccaaggcgttcggcaaacccttgcttgcagacgccttgaaacagcagttcaaccttgaactggatgtggaagcgacctttatccgcctatacatcccgctgaccatcccttggtttcccgtgcgctctggcgccgcccgcgcctggaccgtatcgctgctcgacgccgcactgcacaacttcgaacacaaggaaacccaggcggacgcttatgaaccggcctccacctacatcacccgtcccgacgcttccggccggttcgacaccttgccggcgatcaaacaccaactgccggtcgctgccttcgcccaactgtgtcgcgacctcgacctgggcgcccgttacatgcgctacctgcgtagcgggctgggcatggacagcccggtcgccagcgcggtgctgcaaaccaaggtcgacgccagccagaaagccgccctgcgcgcagcgctgcaactggcacggctgcagcaggatatccaggacgattacgcgcaggtgatagagggtttcatcgatggccgtaccggcctgcgcctcggcacaggtccggtgctgtgccatgaattcagcatgatgggtacaccgctgaccggtatcctgctgttcgcaccggatcttgaaaacacccgtagcgtgcggcgcctggtggcctatgtgccagatgacccggaacacccgctcaaggaatatcgctctgcgctggcattcaagcaggaactgacccggcaactgcgtacccaggactatcaggcgttcttcagtcgcttcgtggcccatgaacacctcggggcgtttttcgccgacctcagccagcgcctggagaaaatcacctggcaccccagtgatcaaggcaaaggtctggccccttggcgcgccgaacccaccgacgatcccacgctgcaattctccgccatcccgatcatgggcgatccgtgggtattcctctatcaatccaggctgaacaaaatcctcaacgacgcccgcaccctggcggtcgccaccgccaccgtggaccgcaacgcccgctgggcgcggtgggatgcgttcgtcaatgtggcctcctccattgtgaacacgctgctgatggtggttgcacccttcatcccggggcttggagagctgatgctgggctacatggcctatcaactgctcgacgacgtcttcgagggcatcgtcgattgggccgaagggctcgaccgcgaagcgtttgcacacctgatgagcctgctggaggctgcggttcaactggggctgtttacggccggcacgcaaatcggcgtgcctgagttacgcaaactgttgtcaccgcaaaccctggccttcatcgatcgtttcaaaccggtcaccctcgccaatggcgcccgccgctactggcaacccgacctcgagccttaccagcagaagctgcaattgccgccgcacctgggtattgacgcacgcggcctgcatgacgtgcgcaaggaatcgatcctgccgctggaaggcaaactctatgcggtgaaaaagtcccctgaggacggccagtaccgcatccaacacccaacacgggccgacgcctatcaaccccagttgcaccacaacgagcacggtacctggcggaccgaactcgaccaaccgctgcaatggaccaaacccaccctgctcggccgcctgggctaccgggcgcagggcctcagtgacgccgaccgcgagttggccctgaccctcagcggcacccctgaagacggcctgcgcaagatgcaccttcacagcgagcccctgccaccgttgctcgatgacgccctggcacggctgcgcatcgagcgcgacctggacaccctgatccagcgcctgaacagcgatgacccggcagtgtacggccgtatcgacccgcaggacctgctgcaactgctcaccgccaacggctcatggccacacacccggggcttgcgcttgctggatgatcagggccgtgtggcgtgggtcttcggcgatcagtccaagcctctggtgcaaattcatgaagcacaattgaccaacggtgacttgctcaaggcggtgctaaaggcgctgaccccggaagagatccgcgcacagttcggcgagcgcgccagcgacccgcaattgagcctggaaacccgcgcgcgcaacctgaggaagcggctggccgagatcgcacgcaagcatcgaggcgccctgttcgaatcgcgctatgggttccggcagcattccgcacacccccaggcccagcggctgatcgacagcgcccccggcttgcccgcatcggtcgccgaaaagttgctgggccaggcaaccgcgcaggaactgacggcactgcgcgaacagcgcacgccaccgcgcctggcgcaactggcccaggcggcccttaccgaggtacgcctgaaccgcgcctacgaggggcaacacctggactcgcacatcaacctcgacagcgaccaactgacgctgagcgcactgcgattgctgccaggctggtccaccgacgtcaacctgcaagcccggcaccgcaccatcgacgggccgctgtggcgcagcatcggccccgacaccgcccccatccgccgcagcctggtacgcctggacagcggccgctacgtgccctatgacgagcgcggcccgctgtccggcgagaccgacctctacaccgccatcctccacgccctacccgatgcccagcgcgatcagctgaacatcggcatccaccaaggccctgaactgcgcgaacgcctgcgccaacacccgccgccacgccacgagctgcgggtactgctgggcgccgagccggaacccgccgtcgaaaccctgcaactgctcggcaacgatgcgggttatgcccaacaaccgcgcaccgcgggcagcccggtgagcctgcagcaacgggcacgtaccctgtaccccggcctgagggatacccaactgcaagcactcattgaacagttgcagactcgcccgggcggcgcagcaacacagctcgctcaattggcccgggaatatgcacaactgaaccgagacctgctggcctggcaaacggatattccgacccaccacccgaccagcgcccaggcgttgagcacctgggagcggcgccaggaggaacagaaccgcttgaccattgcccatcagctcaagcaagcctggcgccgcgaaaccaggatcgacgattactacgaagacccggcccgcgacggccatgtgctgaacctgaacgccaactttctcggcgagctgccacgcctggacgcccagttcgatcacatttccatgctgctgttggacggctccgagtatctgcagggcgtgctgccctttctcagccgctttcccaggctgcgccagctgggggtcatgaacaccccgctggatgttctgcccgcacacataacctcgctgcctcagttgaattcactgcaattgagcaattgccggatcaccctcacgccggagagcctggcgcggctgtcggcgatgcatcagctgcgctcgctggacctgaacggcaacccgctcggcctcgtccccagtatcgaggccctgcctgaactggtcgccctggacctgtcaaataccggcatcgagcgcctgccggccggcctgctaagccgtacggagctacaagccgctatcttgaacgacaaccggatcagcacgttgccgcaggccatgttcgaattgtcggccgagtccagccgccgtttcgacctgtcgcgcaacccgctctcacgggcgacgctggagaaggtcaagacctactaccaggcacacggcacctacctggaggccaatgccctgcccgccgacatgcgtgacgcacaacggctgtttccgacgttccgcgacgagcagatcaaccggttcatcttcgacctgccgggcgacatagaggccggcagagtggccctggcgcaattggccgccgactatcagaccctgaccgaggaactccagacctgggcccgggcccccgccctctccgacgtagagcgcggacgccgaaccgtactcaaggaactgctggaacgcagttggcggcgcgaaaccccgcaacagacccgctggctcaactccctggaaatctcaagcgccctggccggtgagctaccgcagttgagcatccgcttcgagcatatcggcggcattcgtatcgagggtaacggtcgccccctgcacctggatcacttcctgtccagcttcaacaagctgaacgttgtcgacatcagcgacgcgccgctgggggatatccccgcgccgttgttcaacctgcaacgcctggagtttctcggcctgccccgatgctcgatcacgctgtccgccacttccgtgcgggggctggaagggttgaaccgcctggcgttcctggacctcaaccacaacccactgggactcatgccggacttcaaccgactccctcaactgagccgcgtgcacctgcgcaacaccggcctgcgcgaagtgccgaccggcctgctgagcagcgaactgcatgcggcggttgacctgagcaacaatgccattgaggacctgcctgcgagcctctctgatttgcccgacgcgatcgcccggggcgttgacctgtcgggcaacccgttgtccgggcaggcattggaacggatcaaggcctattgccaacgcaccggagagttcttcagagccagggtttccgacgctcagcgcgcacgcgtgcaacagctctacccgaccttcatcgccagcgaggccgatcgtttcagcttcaaactgccaggcacgatgagcgacatagacgctgaaatgcgcgagctcgaagaggaataccgccagctggacaccgacctggatgaatggattgtcgatgtgccgacgcaccacccgatcctcgacatccccctggacgaacagacacgcgccgaacagcaattggtaaggcgcaatttcaagacattgctcaaacaagcctggcgttatgaaagccccgaagacgaagagagcctcgatgacgatctgacccatgcagtgacactcgaaacgccgatactcggcgcactgccacaactcaatgcgcgcttcgagcatgtgacttcgttcgaactgatcagcgacggcacaaccaccgaagtcgacggcaccctcagggggttccccgagctgcagacactgaccctcaacagatgctcattgcaaaccctgccgacgtcgattttcagcatgccgcacctgtcctccctggaccttgccgaatgccgactgagcttgacgcccgaaagtgcgcgctcactggaaaacttgaatggcattgaattcctcgacctgagcaacaaccctctgggccacgcgccagctgtcagccgtttgtatcagctgagctcgctgcacctgcgcgatgcccaattgcgtgaggttcccgagggagtattccaactaccgtccctgcatacgctggacctgagcaacaacctgatcgagacgttgcccgaggccatactggaagtcgcaacaaccctcgacaacgactccgacctgcgcggcaacccgctgtctgagcacagtctggaattgttgcggcagtactacctgcgcaccggttttgccctgtatgtccaggcggctacacgggatgccgcgggcaaccggttgattccaccgcagggcccgccagaagaggagtgaagcaggcgttcaaccgcgttccgacggcaccgatgacagttcgaacgggctgctgctgcgccgctggttgcggtcttcacggggggtggcgccgaagaaattgcggtaggcgctggagaaatgcggccccgaggagaagccgcacgacaggccgatctggatgatcgacttgctggtttgcatgagcatctggcgggccttgttcaggcgcagttccaggtagtactggctggggacgcggttgaggtattgcttgaagatgcgttccagttgtcgtcgcgacacgcagacgtgctgggcaatttcgtcggtggtcagcggttcctcgatgttggcttccatcagcaacaccgcctgggtcagcttcggatggctggaacccaggcggttttgcagcgggatacgctggcgttcgccgccttcgcggatacgctctaccaccagttcctcggacaccgcaccggccagttccgcgccgtgatcacgggccaataccgccagcaacaggtcgagcaccgacatgccaccgcaggcggtgagacggtcgcggtcccagtcgaacagatggctggtggcgatgaccttggggaagcgctcggcgaaatcgtcctgccagcgccaatgcacggcagcacggtagccatcgagcaggccgagctgggccaacggatacacaccggccgacagaccaccgatcacacacccggctcgcacaagctgcttgagcgcagtgctcagttgcgaggcaatgacagtaggtggctcatccgccagcaggaacagcttctggaaaccctcgagcttgccggcccacggctcgcccggcagttgccaggcaccttcggtggccggttctgcaagcaggaacgacagctcgtagaccacatccggatgcacccgctgggcaacgcgcaaggcctcctcagccagcgcaagcgtcagggcttttgtgctgggccaaatcaggaaaccaattttgtgggcggtcatggagtgctatccgaagccagtaacagtaatgaagacaagggccaatgctagcccgtaatcgagtacaaatctcaaaaacgatgcatatccaatgtgggagggggcttgccccctcccacacaaagcaaaccccataggcaggaattacttcaggctgccggacaggaactgctgcaaacgctcggactgcgggttcaccaacacttcccgtggattgccgcgctcttcgacgatgcctttgtgcaagaacaccaactggttcgacacctcacgggcaaagcccatttcgtgggtcaccaccaccatggtacggccttcctgggccaggtcctgcatcaccttgagcacttcgccgaccagttccgggtccagcgccgaggtgggttcgtcgaacagcatcacctccggctccatcgccagggcacgggcaatcgccacgcgctgctgctcgccaccggacatgtggccggggaacgcatccttgcgatggcccacgccgactttggccaggtaatgctcagccttttcacgggcttctttcttcgacatgccgagcacatgcaccggcgcttccatcacgttttcaagcgcggtcatgtgcgaccacaggttgaaatgctggaacaccatggacaggcgcgaacgcatgcgctgcagttgcttggggtcggcggccttcatggcgccgtccttgttggccaccaacttcagctcttcgttgttgagcaggatcttgccggcgtggggttgctccagcaggttgatgcagcgcaaaaaggtacttttgcccgaaccactggaaccgatgatgctgatcacatcaccggccgcggcggccagggacacacctttgagcacttcatgactgccatagcgtttatgcaggtcttggacttcaagtttgtacatgcggtcggttctcacaaaaacaggtggtcagtcgttgagcaagcgcccgtgacgcagcgcttcgcgccccgccaccttggccagccagaaacccgcttgggcataacgtagccgttcaacggcaaacagcacccccgaggtgcccgcgcacagggtgctgacgcggtcttccagggggtcaatcacttcaaagatcggttcgcctttttcgacccagtcaccggctttacgcaggtaactgatcaccccggcgtggggcgcgaacagcagttcagtgccttcaaacggtacgccttcgcacggctcgtattgcggcgcgggccattcacccttgatcaagccctgctcggcaaggaacgccaggatgccttcggcgtggaagaccgcttcgtcgcggccggtatcagcctggccacccagttccagagtcgtcgccaggcaggccagcgggacctgtgcgtcgggaaacgcctgggacaagcgtagccacggcagcgaacaggcttcatcgaacgagctgccgccggagtcttccgccagcaggccgactttcagattcaaatgggccgacagcgaacgccactgcggccaatgctgcggcagcgcatacatgtgcagcgcagcttcggcatcacaatgcaggtcgagcaccacatcggcggtgcaggcatggctcagcaggatgcgctgcatgccctgcaactggctgctcggctcgggcagcgcgttaagcgtgtcactcatggcctggcggatcatgcgcacgttggcgtggggatcatcgcccagcttgccgtcaagcaatgcggcaaccggctcgctcaactcgacgaaatcgcggttgaaattcttgccgctgccgacctcgaaacgcccctggtggctgccttgcagcagttggcccaggcccatcgggttggccaccggcaccagctcgatcacgccattgagcgcaccttgctgttccagttcgacaaggcgctttttcagctcccacgcggcgcgcatgccgggcagttcgtcggcgtgcaggctggcctggatataggccttgcgctcgcccttgccgaaacggaacacgctcagttggcgctcgcagcccaggtgactccagggcaaccggtgatcgatacgttgcatatcagtgcttcctcggcgccaggtagctcagccagcggcgctcggccaacttgaacaggcgcaccaggatgaaggtcaggcacaggtagaacacaccggcggtgatatacgcctcgaacggcaagtagaactgcgcgttcacggtgcgtgcggcaccggtgatgtcgatcagggtgacgatggaggccaggctggtggtctgcagcatcatgatcacttcgttgctgtactgcggcagcgcacgacgcagggccgacggcagcaggatacggcggtacagcttgtagcgcgacatgcccatggccttggccgcctcgatctcgccattaggcgtggccttgaggctgccggcaatgatctcggcggtgtaggcgctggtgttgatcgcaaaggccaggcacgcgcagaaggtggcgctggacagcagtggccacaggaaactctcgcgcaccgcctcgaactgggccaggccgtagtagatcaagaacagctgcaccagcatcggcgtgccgcgaatcacgtaggtatagagccaggccgcaccattgacgatcggctgcttggacacgcgcatcaggcccaggggcaaggccgcgagcaggccgaagaacagcgagatggcgagcagtttcagggtggtcaccaggccgccgaggtacagcggcatggcctcccagatgacgttgtagtcgaagatcatagatcagccgcccttacgcctaccgagtagcgcttctcaagatgacgcagggccagcaacgacacgctggtgatcaccaggtacatcgccgccactgcgaggaagaaggtaaaaggctcgcgggtggcgtctgccgcctgcttggccttgaacatcatgtcttgcaggcccaccaccgaaatcagcgcggtggccttggtgagtaccagccagttgttggtgaaaccggggatggccagacggatcatctgcggcaccatcacccggaagaacacctggaaactgctcatgccatacgccaggccggcttcggcctggcccttgggaatggccatgaaggcgccacggaaggtttccgagagataggcgccgaagatgaaacccagggtgccgataccggcggccaaggggttcaagtcgatatagtcgtcatagccgagcatcggcgcgacgcggttgagcaggtcctggccgccgtagaaaatcagcaggatcagtaccaggtcggggatcccgcggatcaccgtggagtacaagtcacccaaccaagccaaccagcgcaccggcgacaggcgtaacgcgaccccgatcagacccagaacaatggccaaggccatggacgacaaggcgagctgaagcgtcaaccatgcgccatcgaggatgacggccccgtagcctttcaacatgattcaggtcctcgaaaagggggatgaaaaaatggcgcaaacctcaggaattctgttgcttgcgccatttgggacagacagctgcgacgagttacttagggtcagcgccgtaaatatcgaagtcgaagtacttgtcctggattttcttgtattcgccgttggcacggatcgccgcgatggccgcgttgatcttgtccagttcggccttgtcgcctttacgcacagcgataccgatgccgtcgccgaagtacttggcgtcggtgaactgcgggcccacgaacgcgtagcctttaccggccggggttttcaggaagccgtcttgcagcagggtggcatcagccacggtaccgtcgaggcgaccggcttccacgtccaggtagatttcgttctgcgagctgtaaggcacaaccgtgacgcctttaggggccaggacttccttggcgaaacgatcgtggatcgaaccacgttgcacaccgatcttcttgcctttcaattcatccaggctgtcgctgacggtggtgccttccttcatcaccagctgcgctgggctcaggtagtagcggttggtgaagtccacggacttcttgcggtcgtcggtgatggacatggacgacaggatcgcgtcgatcttgcgcactttcagcgcagggatcaggccgtcgaattcctgctcaacccacgtgcacttgactttcatctctgcgcacagggcgttgccgatgtcgtagtcaaaaccgacgatgctgccatccggcgccttagaggcaaacggagggtaagccgcttcgataccaatcttcaggggcttttcatcagcgaaagcctgcatggacagcacggacagcgccagggcgcccaacagcacgagtttcttcatcttgggactccatcggtatagggcaaaacagcagtatgagccatggcccacgatgcggcgtaagggaaaccgaatagcggtgctgcgtcctacaccgattcaacatcggagacgacgagcgagtgatcggcattctaacgacaggctggaagccgatatttcctcaatgcgacaacaatttacagaagcaccgagaaagcggatccaactcattgacagcctctggattttatgcagagacaaaagacattaaacctgtagacgctgcaaattgcgggcctattattcgcaaacccttctggcacggcaagtctggcgtttaatcttatttcctggggtgtctggaatggggtttttcggggcgcagacgtagcacattgcctcaggtttgggcgggaggttacacattgagggttggcggtaacattcagaaacgccctacacgaaaaaccgatatttatttgactggcgtggatcccatgtgggagggggcttgcccccgatagcggtgtgtcagtgaaaggcatttcaactgaaccacggcaatcgggggcaagccccctcccacactggatctccggtgcttttgaggccgctcaaaaaagccccacccggcttacaccgggtggggctttatctgactatcccgccttacgcgacgttcatggtcttgtgcgtctcgatcaaatgcgccaccacacccgggtccgccagggtggagatatcccccagcccgtcgtactcagccgtggcaatcttgcgcaggatacgccgcatgattttccccgaacgcgtcttcggcaagcccggcgcccactggatcacgtccggcgaagcaatcggcccgatctccttgcgcacccagtttttcagctccagacgcagcgcctcgttcggctcttcgccgtttttgagggtgacatacacatagatgccctggcccttgatgtcgtgcggcacacccaccaccgccgcttcggcgactttagggtgggcaaccatggcactttcgatctcggcggtgcccatgcggtggccggacacgttcagcacgtcgtccacacggccggtgatccagtagtaaccgtcttcgtcacgacgcgcaccgtcaccggtgaagtacatgccacggaatgtcttgaagtaggtgtcgacaaaacggtcatggtcgccgaacagggtacgtgcctggcctggccacgaatcgaggatcaccaggttgccttcggccgcgccttcaatcaggttgcccaggttatccaccaacgccggcaccacgccgaagaacggccgtgccgccgaacccggtttgagcgcatgggcgcccggcagcgggctcatcatgttgccgccggtttcggtctgccaccaggtatcgacaatcgggcaacgggattggccgacgttcttgtagtaccagtcccacgcctctgggttaattggctcacccaccgaaccgagcaggcgcaggctggagccgtctgcgccttcgcacgcagcagtgccggacgccatcatggcgcggatcgcggtcggggcggtgtaaaggatattgaccttgtgcttgtcgacaattttcgccacccgcgtgatgtccgggtagttcggcacgccttcgaacagcacggtggtcgcgccgttggacagcggcccgtagacaatataggtgtggccggtgacccagccgacgtcggcggtgcaccagtagatttcgcccgggcggtagtcgaacacgcgctcgtgggtcaggccggcgtacaacagatagccgccggtggtgtgctgcacgcccttgggcttgccggtggagccggaggtgtagaggatgaacagcgcttcttcagcacccatctccttgggcgcacacacagtgcccgctactttcatcaggtcttcgtaccagatgtcacggtgctggttccacttgatctggccgttggtgcgcttgcacacgatgactttctggatgctgctggtttccgggttggtcagggcgtcgtcgacgttggccttcagcggaatcttcttaccggcacgaataccttcgtcggcagtgatcaccaccttcgacttacagtcgatgatgcgaccggccagggcctccggcgagaaaccaccaaacaccacggaatgaatcgcaccgatacgggtacaggccagcatggcgaccacggcttcggggatcatcggcatatagatagtcaccacgtcgccgcggtgcacatcctggccgcgcagggcgttggcgaacttgcagacttcttcgtgcagctcgcggtaggtgatgttgcggctctcggcagggtcgtcgccctcccagatgatcgcaatttgatcgccacgctcggcgaggtgacggtccaggcagttgtaggaaacgttcagggtgccatcggcgaaccacttgatgtcgacgtggtgatcgtcgaaagaggtctgcttcaccgtggtgaaaggcttgatccagtcaaggcgcttggcttgctcgcgccagaagccatcggggttgaccaccgactgctggtacatggccttgtaggtcgcctcgtcggtcagcgtgttggctgctacttcggggcgaacggggtacagggaagccgcactcatctttcttacctcggtgacatagttgttgttgtatggccctgttgtagccggggccgacctatagaaccattcgacgatggtagtaacaagcccctacaaattgccctgatatccccgtttgcacctctagcccgcgggccgtggcgctttgcggctttgtgaaaaaagctttaccacaggattgttacaaaaaccgccaatagtgtttatcaaaagcacgggtatatgaatataacgtgagggcctaaaatcacttccgccaacaaggcactgtagttaaatacagcagtgattaacaacgcaacagcccccacgaaggcaacgttaatccgaacttcccaactcttaagttacacacgtggcctcacaagggccccgtgacccctttcgccctgaagaaggtaaatagagaaatgaaagctttagtagttatggccctcagcagcttgtgcgccaccgccgccctggccgacgaagccccgactgacgtagctggcagcaaccctccgatcgttgaagactacacttacagcacccatctggatgtggcaaaagtactgtccatgagcagtattccggaagtgtgcgaagtggtaccggtgaagatggaatatgaagactcacagggtcagcgtcatatacttaattaccatgtgatgggcaatggttgttctaacgggtaatcacttggttagtttgaacttattcgccgcaagaaatggttcttgcggcaaagcaccgccccccttcccccctcgctgcacatcctcaaaaaaaatcctgccgctcgcccctccagccaaccccaataaacccgagccttggctcgaaaagcaggctttttgtctgcgatccgtgaccatccgccacaacacaaagccgattttttccctataatgcgcgggtaaatcgggcctgcaatatccctttacacagggatgaagagccagacctgaggcctcccgctggagcaagcaaccaccgctccgcacctcaagcctcacgcagagcacccgtaaccctattccgtttaatgcgtgcgctagctgcaacaaacgattccttaagatccaccgcggccctgggggccgtgtgaacacccaaccatccggtttcacacgggcacctttgagccctcacgcaggagacgacacgtcatgctgagctgggacgaattcgacaaagaagaagaaggcgaagtggccaccaaaggcgccaacgccggccacgccaccgaagccaacatggaccgcctcgacggtgccggcgctgccgccgccatcgaagcccgcgccgtcaccgccagtgactccgccgccatcgtccgcgccaaggccgccctcgacaaactcgacgtcgccgaaggcctcgccgaactcgaaggcgcctccgcccgtgtcgccgttgacgaaaagcgcatgatcaactgccgcgccgacctcaaccaactcgtacccttcaagtacgactgggcctggcagaagtacctcgacggctgcgccaaccactggatgccgcaagaggtcaacatgaccgccgacatcgccctgtggaaaaaccccgaaggcctgaccgacgacgagcgtcg

SEQ ID NO: 91 - DNA, 567 bp, Pseudomonas nodulensis; identical to SEQ ID NO: 14

SEQ ID NO: 92 - DNA, 475617 bp, Pseudomonas nodulensis
  misc_feature (35745)..(35820): n is a, c, g, or t
  misc_feature (127568)..(127594): n is a, c, g, or t
caggtaccaccaacccgttcccgtggatgagcgaaatcatggacttgaagaaagagaaaaacttcttcgagacccgtgtgatcgagtaccagactggcggcgcgctgagctgggattgattcctaagccaagcaaccccatgaagccctgacgtgttcagggcttttttgtgcgcggtgaattgctacttcttgaagcacatcaggctgaccacctcgcccagaagggttcggatcgcaccaccaatgctgtagccttgtgccccaattgccatcagcgttgtcaccggtcgagtgaccgggatgccttcaccgaagggctttacgccaaagtcggaagattggcacgggagtagactcccgctgtcacacctgatgcacactcaataaatacccgataggaccgaggccaacccgtgaacccagacatgctcgaagccggccccgctgacgccaaagtactttccgtctttgacttcgacggcaccctgacccaccacgacagtttcgtgcccttcctcaagtttgcctttggccccggcgagttctacggccggatgctcaagctggcggtgccggggctgcgttttctggtgcggcagatcagccgggatgagttgaaggcgcagttgatccgcacctttatgaccggggtggagaaggcatgggtgcaacagaaagccgaggagtattgccagaagacctgggcgcggctgatgcggccgacaggggtgttatcggtggagcaggagttgggatccggggcggaggtcacgttgtgttcggcgtcgccggcattggtgttacagccgtttgccaatcggctggggatcaagctgatcggcacggagcttgaggtggtcgacggggtgttgaccggcaagctcaccgggaataactgccgatgcgagaacaaggtgctgcggcttgaggcggtgtacggggatttgggcgactatcggctgcgggcctggggcgatacgcgtggggatcgggagttgctggcggcggcgcaggatgcgcattttcggcattttcatgcgaagaagaagcgggctcggttgcagcgatgatgcgggtgggtggggttggcgggtagaccgagggtcgcgcactagcatggggtgccagtgcgcggatggcccattccgatcaatcgtcaccgctacccaattcttgatcttcaaatgtggatcgcaccgcttccacaacccgttcggctaggtgaatcacttccagctgcggataagctttcttcaatttccccgatacctgccagccattttcctttaacgaccgaatgactcggtttgcgtcctgatcaggcatttccagcacttcttttagccgttcctgggcgcgctgaaagatgaccaacacacgcgcttcatcagccatctctatacgaaccgtgtgcgccactacctgtgccgtatacaagacttgttcggtcaagtcggggtagcgccacgcgaattgcgcatcgtcgtagtcatcgaagaccagattgctgcgggttccgtcctcgtagactacaagttctccaaatcgataggagccagcgtagcgttgcatgaatggccgcgaaaatgcctccagcgtacgatcgtaacgcgcccggaaatcaatcgaacttgtgattgtggccgacactggcaagattacgccttcaggcaccgccttatcacggatcaaggtatcgttgatcagaaagcgatggatccgaccattgccgtctcgcatggggtggatatagacaaaagcaaaagcgattacagcggtccgggccagcggctcagcgccccgtgttgccaactcgaatgctttcaagccgtcgagcaattgcattagcacctcaaatggcggcgcaatgtagtgaacgatatcctcgcgcatagtggcctgccccacgaagaccggtgagtgccgcaagcccagccctagcgcctcttcccccaaaataccggcttgcaaggtgtgcaggctttcattactcaacggattctcgatgtgaccacagtacttggcgatcacgtgggcaaaccgctggatcctgtcggctttgtctgcctctctctcgatcaaaaagctggcacgcgactccttgaacgtcagccaactcgccgtgcgcatcaggatatcagcgccaaaggtctggttcagctcccccagtgctgcgcccagatcaaactgcaacgcttcttgcacggcttcggtgcgacggatcaagggggagaacgcaggtacgccgggaagattatcgttgatgcgccagcgccttatacgcaaaggctcaacgcgggtcaggtaatgctgtgatgaaacagcatcgacatagccgccattggtaacatctggtacatcaaggtgcagtccggttaaccactcgtacaggaatccggtgcggcgggcatattgaccaaaaggcgtttgccggcaccaggcttcgacgggctcagggccggctgcagcaaataggcgagcgaagaattcgaggtgaatttcttcgtacttgagcccgaactcgaaatgccctgcaaagtcgtccgagggttggtagctgagggggtacttacgctcgacatgtccattgctctcgtggctcatgcgggtcgtaccgattgccgattcgacgcgcagtggctgtgccagcgagatacggtagcggtcagcgagtgccttgaagcctacctgcatggtcgaatcccctaacgaaccctaaaaaacgataactattagggaatagtaggcgaaaacgataattttgtgagtacgaaaacgctaatgcgctcttaaatttgctaacaaatcagcaatttcatttgaaaacgataacaacctaaagggaagcgatccgaatgaatggggccgtcaggagaccgaggcgatcccttcgaagcctcgctggggctcgacagctcccacagttgatctctgtcgctcggggggacggtgtttggcttgagtgttatgtcgtggctttgaggtccacgcccaaggctgttgcgaaggcttttaccatcgggctgcgcggggcgctgtggcgcaggatcaggttgaacgcggtgctcaggtgaacctgttccgggcacagtgcgcgtaggcgcccttcccttaccaatggcgcggcgtagtgttccggcaggaagccgaggaagcggccggtgaggaccaggatcgcgacagcttccacttgtgaggccgaggcggactggctgtcgtagttgacgaagttggccttgtcgcggtggatcgcataccgatggttcaccacttcgtattggcgcaagacctcgggcgtgaggtcgtttgcgtcgaagagtgggtgtcctacggcacagtaggcgtgggccttttcttcatacagcgggaaataatcgaattcttcacgccgttgatacaccggcacgataccgacgatcagccgcccttcgaccacgccgcgttcaacttcgtccaattgcgaggcatgtaggcgcaatctaattttcggcgattcgctgtgcaatttccctagcgcggtaattagcggggaattaacgtcggacacggtgttatcaattacgcccacactaaggtcgccaataagctcgttttgcgccgaactaagcttgtcgcgaaaactgtctaccgaggtaaataactcgatggacgcctgatacaccaacttgccttcttcggtcaggccaaacccttctcggccccgggtgcacaggcgcatgccgatgcggatctcgaggtcggagatctgtttactgatggccgccaggcccacgttcagctcgttttgcgcggcgctgaagccgccggcttcgactacggccatgaacacgcgcagcaatttgaagtccagcccgctcagttgcaggggcggtcttgtgccgggtttgggtggcaggtttccagaagtggaaagtggggtttccataatacgcgttgacctcaagtgccatattcaacaggcttcaacccaatccttgaacatagccaggcggcgataatgaacataaacatccgcccttggcaaccttgaatacggcgcgtcagacgctggttcagtctagttgaaaacttatttttactgcctccgactcttctaaaaacaagcgtgaggaacatccatgtcccagcccaccgaccgcctttggggcgctcgtttcaagaccggcccatctgctgcattggccgcgttgtcgcgttgccctgagcgctatttccgcctgacgccctacgacctggccggctcccgcgcccatgcccgtgagttgcagcgcgcaggtctgctggatgagtcggagaccctgcgcaccctcgacgcgctggacggtattggtgcggacttcgccgccggcacgctgcatccgaccctggatgacgaggacgtgcacacctttatcgaacgcgtattgactgaacgcctcggcgccctgggcggcaagctgcgtgccgggcgttcgcgtaatgatcaaaccgccaatgacctgcgccttttcctacgcgaccatgcgcgcaccatcaccaccgaggtgttgggtttgcagcaggcgttggtggaacaggccgagcaacatgtggaaagcatctgtcctgggttcacccacttgcagcaggcgcaaccgattgtgttcgcccaccacttgctggctcacgcccagtcgatgttgcgcgatgtgcaacgcctggtggattgggatacgcgtacggcgttgtcgcctttgggggcagcagcgatggccggttcggcgattgcacgccagcctgagcattcggccaaggaaatgggctacaccgggccgtgcgaaaactccatcgacgctgtcgccagccgtgaccatgtggcggagttcctgtttgtggcgggcatgctcggggtgaatatttcgcgcctgtccgaagagttttgcctgtggtcttcgcggcagtttcgctgggtggtgctggacgatgcctacgccactggcagctcgatcatgccgcagaagaagaacccggatattgccgagttggcgcggggcaaggctgggcgcttgattggcaacctgaccgggttgatgtcgacgctcaagtcattgccgctgtcgtacaaccgcgatttgagtgaagacaagcacagcgtgttggacagtgtggacaccttgctgctggtgctgccggcgatggccgggatggttgcgaccatgaaggtgcaggtggaagagcttaggcgtcaggcgccgatggggttcaccttggcaacggaagtggcggattggttggccactcgcggcgtgccgttcaaggaggcgcatgagattaccggcgccttggtgcaggcctgtgagaagcatgagattgaactgtgggaagcctcgccggcgatgttggcggaggtggacgcgcggttgacgccggaggtgcgcgattgcctgaccctggaagcggcgattgcagcgcgcagtgggtggggtgggacggcgccggagcgggttcgggagcagattgggcggttgaaagcggccttggccgaacagcaacagtggacagagagttaccagggatttcggatttaagcctgcaaccccgtggtgtctggtccggcgctttcgcaggcaagccagctcccacattggaccgagtacatcagtaccagcgtcatcagtttttggagagtcaccatgagccaaaccccggccgagcgcttggcagccgagcgcaagttgtccgaaaaccagttcgatatcacccagtacgagcacgtaccgcgtcgatattacgggcggatgttttttgccacgttgatcgtgatcgtgttggccgcgctgttgcgtgccttcgccaacggtcagatcgaatggtcctacatcgggcagttcctcacgtctgaggccatcctctggggcctggtcaacaccatcgtcatgtcgatcctggccatggcgctgggcgtggtgatcggggtgatcacggcaatcatgcgcatgtcggccaacccgatcctgcgctatgtggccatcacctacacttggctgttccgcggcacgccgttgatcctgcaactgctgctgtggttcaacctggcgctgatcttcccggtgatcgcgattccaggcctgttcagtatcgacactgtcgacctgatgacgccgttcgtggccgccctgctgggcctgagtatcaaccagggtgcctacaccgccgaagtggtgcgcgccggtttgctctcggtcgacaccggccagtacgaagccgccaagtccataggcatgccgagcctgcaagcgttgcgtagggtgattctgccgcaggcgatgcgggtgatcattccgcctgtaggcaacgagttcatcagcatggtgaaaatgaccagcctggccagcgtgatccagtactcggagctgctgcacaacgcgcaaaacatctactacgccaacgcccgggtcatggagctgctgattgtggccggcatctggtacctggcggtggtgactgttctttcatttggccaaagccgccttgagcgccgctttgcccgcggcgccggcaagcgttcgtaagtctgggttgaggagatttgccccatgagaagcatcgtcaaggccgtcaacctgaacaagtattacgaccagtatcacgcgctgcgcgatatcaatatcgaggtcgagcaaggcgaagtgatgtgcatcatcggcccgtccggctcgggtaaaagtaccctgctgcgctgcgtcaaccagttggaaaaaatcgataagggcggtctgtgggtcgacggcgaactggtgggttaccgggtcgtcggcaacaagctgcatgagatgaacgaatcgcagattgcccgccagcggttggccaccggcatggtgttccagcgcttcaatttgttcccgcacatgaccgtgttgcaaaacatcatcgaaggcccgtgccaggtgctcaagcgctcgcccaaggaagccaccgaggatgccctggagttgctggcccgcgtcggcctggcggacaaacgcaatgcctatccggtggagttgtccggcggccagcaacaacgcgtggcgattgcccgtgcactggcgatgcgccccaagctgatgctgtttgacgaacccacgtcagccctcgacccggagctggtaggagaagtgctgtcggtgatgcgcgatttggccaccaccggcatgaccatgatcgtggtcacccatgagttgggcttcgcccgcgaagtctccaaccgcatggtgtttatggatgccggccagattgtggaagccggcagccccgaagaaattctaataagcccacaaaacccgcgtacccaaagctttatttctgccgttcgcacttaactaaaaaacaaacgagaacgcccccatgaagaaaatgtttatccccacgttgctcgcaggcctgatggcctcttccgttgttttcgcggcattgccggcggcaatcaaggacaagggtgagatcagcgcggccatcgtgccgaactacccgccgatggacttcaaggacccggccaccaacaagatcaccggcctggatttcgacttgggcaacgccctcgccgagcgcctgggcgtgaagatcaagtggcaggaaaccggcttcgagcagatgctcagtggcctgaccaccaagcgcgtggacatcgtgctgtcgggcatgaccgacaccgccgagcgccaaaaggcggtgacctttatcgactacttcaccagcggcccgcagctgtacaccctggccaagcgtgaagacctcaaggaattgactgacctgtgcggtaaaaaagtcggcaccagccgtcgcaccacctggccgtcggaaattgccgcgtggagcaaggaaaactgcgaagccgccggtaagccggcgatcgtggtgatcggcactgagggctcggcggatgcgcgggcgcagttgcagcagaaccgcctggacgctgcgatgcagggcagcgagaccattccttatttgatgtcgttggacaagggcaagtacaagccggtggggttggcgatttccaagcagttcaccggacttgggattgagaagagcaatacggagttggtcacggcgatcagtgaagcgttgcaaggcatgatcgatgacggcacctacggcaagatcctgaagaagtgggacctggagcaaggtgcggtagagaagatcaccatcaactccggccaataactcgatctgaacaatgtgggagggggcttgctcccaatagcggtctatcagccaagcatctggtgactgagccaccgccatcgggggcaagccccctcccaccctggattttcgttgtccacaaaataacaaggacacccgccccaccgtggccacctactccctggtaatccgccgcctgatgatttgctcgctgaccatcgtggtcagccgcgccatgaccagcccgttgctggccctgttgctgagtacccgcctgggcctgaaccagcaggacatcggcttgctgatgggcatcgcggtgtttatcgcgacattgctgggcctgtacggtggctacatcatcgaccgcctggaaaagcgcaagctgctgatcctggccatgctctccagctccatcggttttctattgctgacctttgccagcaacctctacctcaccaccctgaccctggtcatcaccgaagcggcgtcggcgctgttcctgattggctcaaaagccatcatcagcgagaacctgccggtgggcgagcgtgccaaggtgttttccctgcgctacacactgaccaacgtcggctacgccacaggcccgatggtcggcgtcgtgattgccggccacatgcaactggcaccgttcctgatcgccagtgcgatcgcctttggcagcctgttcctgatgattggcatcccgcccacccaacgggatgacagcaacaagcccttgagtttcctcaccaccctgcgcaccttgcgcaacgaccgcacactgattctgttcaccagcggcagcctgctgagcaccattgtccacgggcgctataccttgtatctgtcgcagtttttgctggtagcctacaaacccgccgaggcgctgaagattctgtctgcggtactggcctgcaatgccatcactgtgattttgatgcagtaccagatcggccgtttcctcaaacgtgagcaactgcgctattggatcgtgctaggtacgttgctgttcatgaccgggcttgtcggtttcagcctcgcagacagcctggtcacctggtgcatggcaatgttcgtgttcacactgggcgagatgatcatctacccctccgagttcctgtttatcgacaccatcgcacctgatgcactgcgcggcagttactacggtgcacagaacctggcggcattcggcggggcaatgagcccggtgatttgcggctatctgctgatcaatgccacgccggccagcatgttctatgcgttgggggcactgactgcggtagggggcaccttgtgtttcttgagtgggcgacgggtagcaggttcttgctgatatttacccaggatcccgctattaatagcgaaacctctcacggacccgagccccatgaaattcgatacggcctacagcctgagtctcgatgacaagctgtcgatctacgacgtacgagacctgaatttcgacgagaccgccgacttcgactccgacaaggaccgtttcctgtgccccaacgatgagtgccgggcagcgtttgatcccggcaataccctgagcaccttcaacgctaaaaacgtcaattacctgcgtacgccgcacttcaagaacaagaccggcacccggcatatcgacggctgccgctacgccagcacgcacaagagcgcagccggcgaaagcgacgacgagcgcgaggacaatttcccatcggaattagtgctcacccgccgtcagtacgagcgcaagaccccgctggcaggctccgaaggaaacatcccacaagagccaacaaagactccctcaaaccgcagctccatttcccacaacgccagcgacaccacaccggacaaaaccagcgtgttcgcccacccggtggaatgctacgtgtccaatatcgacgacaaggacaagctcaagtccatgccgttgaagatcggcgatcacaccgccacctactggacgttcttcaagaagatcgaatacctgcaggacaacaagggcctgatctactggggcaggatcaaagaaatcaaggactacaccagcagctttcgcatcgacttcgaaaagaaggtgtggctcgacaagaagccctactcggtcaatgtctacctgagcaagaaactcatcgagaactaccgcaagcgcaaggcgttcctggagcagatcaaggcggcggtggacagtgagcgggcgttgtactgcttcttctatggggtgacgccggaactgaaacaggtgccgagcaagaaaaaccccgagcagacgttcggggtgttcagcgcgaatatcgagaacctggatcacctgatcattcgggaggcgccgggggtggaatagtgcgcatcagcggcaggacgctttgtatgcccgatagatttcgcgtgtttgttgagccttggcgacacctacgcccccgaaggctaccaaccagtggatcagcatttcctcatcaggaaacacataggtgttttgccctttgaatcctctgggtgttcgattgattcctgcgtcgtagcgcaatggactccaaggctgcgttacaaaatcaaaatcctcggcatcccatttaaagaaccgcagtacttcattaagggtagtctggccactgcgatcgccacgttggacgaggcaataggcttgattagccaacatctgctccagcacctgaggatcgacccaatccagcactgcgcatttcaacgcattatctagaataccggccgtccaacgctcgaaaaacacctggaaaaatcgttcgctatcagcttttttcatatcgaaaaagagcatgcagtaacgggttttaagatgcataaccactaccacatgcttgcgtttaactgtcgcagcatgcaccagccactgatgggggtcgctgtgaagatcatagctctcgacaggcagagcaggccgtagaacgggtgtatgctttttgcctttgtgtactcggctgaaaaactcacaggcagcttgtgagcaattgaacgtcagcattgcagttgctccttcattttacttcccacgccagcaacgaaccgtccaggtttgtgatgaagggatatccacccattcaatgtcataaggttgtcgagcggcatacctaatcgcatccagcgcctctccagtgagaactgccaactcggaatccgtcggcaagtcacgcgtgaccatcacagccaggccactgagtcggttcttcaaatgcagcttttttgtacctgtcatcgccatcgtctggcaaatagactactgccagggcgcaggaaatcgaacaaggccatgtcataaaaaaccagttgatgagcggtcaaaacaactgtacaaaaacacagtatattttgtcctcccccgtcaaaccctggagataccccatgtcctctctggcaatgagctctttcgtagaacagcagatcgtcctgcatcaattcaccgccaagcacagcgtacaggcgcgcgcgatgctgggctggagccgggaacgcctggcacaccaggctggcgtggcggttgaagccgttcagcagtttgaatgtcaatgcgacgtggatgacgaaacccgcctggccctggcctttcggctggaagctgaaggcctggtgtttttcccggggtttgcgccggggtgggggatgagtacacgccgctttgacaccgccacaaccgaacacgcagcgcaagggatcatctctcgcttgatcggcgcaacttcgtcatcacttgactcacccactgctcaagccaatggtgcatagcggccagccgtaccaccttgctggccagcgcctggacggggtcccatgcactcccctctcaaccgcgaaacgtcaggcctgcagttgcaatgcctgacacgtcatttgcggcgtcagagcaccggcttgatttgagcacgggctgcctgctcatacccatgggccacggccagcaaggtgggttcggaccactgggtcccgaaaaaataggcactggttggtagcccattctcatccttacccgcagggacagcgatgcctgggtagccggctgctgctaccccaaaatagtcgttagtctcaaaatccgacaccatggcgtccagaccctccgatttgatcgggtcgtcaatggtagcgcgaaagtctcggatgagctcatcccaaaagggtttgctctgctcaggcgtcatggtttgggcattgatttggttgaggactgtctggtgatccacctccgcgccatcacgtttaatgttgaacagggtcagatcaggcagtgaatcgactggcaaccctgaacgcttgcccacataagtattcaattcattctttacgtccgagaacaacaaatctacccaacgcgaatcatcggccaggcgcatctcgaccggcactacttccgcgccttgctcacgaagcacggcaagtatccggcggaatgacgcactgtccttagtgggtgtgggttcgccagtttcagaaaacgttgcgggatagccgatacgcttgcctttcaacgcgcctggaaccagtaatttcgtgtaatcgataccttggggcgctccctggctcgccggatccttgggatcgctgcccgacatggcattgagcatcagcgccacatcaaataccgaacgcgccatcgggccaggagtgtcctggtggtgacttgcaggaataattccattacggtccagcaagccaacgctgggcttgagcccgacaaccccattgcgcgctgctggcacaataatcgaaccactggtttcagttcccaccgccaagggcgccaaccccgccgcaacggcgacggcagacccggaactggaacccccgacgtcggcatccgcaccatgtgggttacgggtttgtccccccctgctgctccagccatcaggaccaccacgaaaccctgccagttcggtcatattggttttaccgaggatcaccgcgccctgcttgatcaggtagtcgaccaatggggcgttcttgccgacaggtgcccccaccaggccaaaagcacctgcactggtttgcatgccttcagtttcgatggtgtccttgagcaaaacaggaatgccatgcaggaggccacgcacgttgccgctggctcgttcacggtccagttcgcgtgcggtttcaagtgccttggggttgagttcgatgatggacttcagtttcgggtcgaccctgcgaatccgctcatgcaggtacgtgaccaagtcggctgaaccgaacctgccttgggccatttgcgcgccaagctcattgacattgaggtattcggtccccggagggactgcctttgaaacaacaggtgagtggccgtctgcaaaagactgaacaaactgccggacgatggagcccattccatatgcgataccgatcataaaacctctcgaggagtaagaaatgacgaaggaccaacgttgatccgtgggccagtctaaaaactcttctcctgccggacagcgcgacgcgtgcggttcactgtgtgggatagttcaacgcaacgggtagccttccaaggggtccatcaaacgacgggagcttcgatactcgcacaccatggccaccaaccactccttcgcccatcgtgcgccgtagaaccaaagtgtcgcgccatcctcgagcggctcacccagccccgggtaaccactccagcaagccccatggaaggcggtactgcggctgtcggataccaaggcatccagtcgatactcatgcacaagctcatcgatttcattgcgaacatgcagggtgtcgatacggtgcgcatgcaccggtaccagtacggcgccggaccgaagcaggatgtccagcgctttcaggaaggaggtgcggtgctcaatcaactgatgttcatgcccctccacaaaccgctcggcaaatcccaggcgcctgccctgcaacgcactggcggcggtaaaggtcgtgttgttctgcaccaggggcacttccaccatcaccggccccgagggttcaataccactcaatgcgatcaatgacagcgacgggtcacgcgagggttttagagggagtcccggggcgtcataccccgggaccgggacgcttttccccaaggcgccatgagcttggggatcagcaccgaaagcgataccacgcgagcttgtatgctcttgggctatcgttgcctggccagacgaatcagtgagcgcagacacccgctgccctgtcggacaaggcaaccccgcctgccaatatttcttgcacgtgctctccataaaagacgtcccccgacacataaattttcggggatcatcgcaccgttgcctggcgcctgtcgcagctctgaaacagcttgaaaactcctttttccatagcctcctccgtcagcctgcgaggtgttcctgcgcaccctgggcttccacctccagccaccacgcaaccccacgctcaggctgattcaagctgaacgcctgccccatctgcggcgtagtgatggacacgttgcgctcccaggccagggccatgatgcggtcgaacggctcgtgccaggcatggaacgccaggtcgaaagtgccgttgtgaatcggcagcaaccagcggcccttgaggtcgatatgcgcttgcagggtttgctctggctgcatatgcacgtgaggccaatcgacgttgtaagcacctgtttccatcagcgtcagatcgaacggaccgtactgctcgccgatgcgtttaaaaccgtcgaagtaacctgtgtcaccgctgaagaaaattcgccgaggaccatcgatcatcacccaggaacaccacagggtctggttcgcatcaaataggccacgcccggaaaaatgttgcgcaggggtggcgacaaaccgaatgccatccacttcggtgccctgccaccaatccagttggcgtaccttgctggaatccacgccccacttgaccaggatgtcgcccacgcccagcggcgcaagaaaataacggaccttgtcggccaattggacgacagctttgcggtccaggtggtcgtagtggttgtgggaaagaatcaccgcctccaggggcggcaactcttcaaggctgatcggtggctgatggaagcgcttggggccggcccaactgaacggtgaggcgcgctcggcaaataccgggtcggttacccagaatttaccgcgcattttcagcaacacggtggaatgtccaaggcggaacacgctgtgatccggggccgccagcaattgctcgcgagtcagtggttgtaccgggatctgccccaccggccgcgtgctgcgtggtttgttgaacaacatgttccagaaaatgcgcaaggttttgccgaagccaccgtgctgcacgggggtgtcgttgctgaagtgcccttggccttgcttgggcgctgctggcgaagaatcgacgcgggacgagatcgtggccatttccgggtgactcctacggatcgcttataaattacactgcacagtgtagtttcaagattgcaacaaaatccggagcaagtaaactaccgagtgtaattttcctccaagagccgagcgccacccatgactgcacctcaacgcctcaccgaccgtaaacgcgaagccattgtggctgcggccatcgccgaatttcgcgcaaacggtttcgaggtcaccagcatggacaagatcgccgccaccgccggcgtatccaagcgcaccgtgtacaaccacttccccagcaaagaagaactgttcgctgaaattcttcatcaactctgggccagcagcgtcgcccaacttgacgtcagctacaccagcgaccgcccgttgcgcgaacaactgcgcgggctgctggaggcgaagatgaagatgatgtcggacgccaatttcctcgacctcgctcgcgtcgccatcgccgccaccatccattcgccggagcgtgcgcaagacatggtcacccgcctgagccagcgcgaagaaggcttcacccaatgggttcgcgccgcccaggctgacggccggctcaactgctcagaccccgccttcgccgcccaccagatccagagcctgctcaaggccttcgccttctggccacaaatcaccctcggccaacccactctggatgcagcccaccaggccagtgtgatcgagtcggccatcgacctgttcctcgccggctacgaagtcaccgccccccgccaaccgtaaaaaacctgttgtgtgagcgacattccaggtcgtttttgacgcattcgccctccgttttgcgcaaatggcctggaaggacactgattattcccacgcgaataactgacaatattcacagtcattatccgatcaacggttgatccagcgaacgcgcgccaccgtatctgtaaaaaacagctgcccccaggaatttatggaaaacagacaaggcaaagggctttcatttgccaagcgtatctacaaaccaaggatcatcggccttgccatcggttgcatcagtgtcagcggcgccctttaccccctcgccatgccaggctgggtgtgggcactcctgctgttcaacgggtttgcctgggcgcatgtggcgtatcaactgtcgacccgctcgcaatacccctaccaggccgaacaacgcaacctgctgtatgactcgctgctcggcggcttctgggccgctgccacgcagttcacgccactgacggcagtgaccatcctgtcgatgatgaccatgaataacgtggccgccggcggcaagcgcctgttcctgcgtggcctgtgcgcacaagggctcggaatcggcgtagccggggcgctgttcggtatccggttcaaccctgatgtcagcctgctgcaggtctacacctgcctgccgatgctgacgctctatcccatggccatcggcatggtctgctatcaactggcaatcaaactgtccgaacacaagcgcgccctgagcgccctgagccgcaccgacagcctcaccgggctgctcaatcacggttcctggaaggacctgctgcacctcaagttccacaagtgccagcaacagcaaagccacgccaccattgccttgatcgacatcgaccacttcaagcagatcaacgacacccacggccatattgtcggcgatgcggtactgcggcagttgagcctggagttgcggcgcaacctgcgggaaaacgacctggccggacgttacgggggcgatgagttctgtgtgattcttccgcaaatgccgctggaacaggccgcccggatcatggagcgcatgcgcgaaaccttcagcaattaccgcaacccgcagatccccgaattgcgggtcagcctgagcatcggcctggccgacttccaacccttctttagcgatgccgcgatgtggctgaatgcagcggatcgcgcgctgtacgccgccaaggacaccgggcgcaaccgggtcaatgtcagcgacaaagtgatcgcccattccgcctaaagtcgtcctacgactactcgtccgaatcttccagcctgccagccagaagaaagcataatgccaccactggtcgcctacccaaaaaaggtcctccctcaagggcgaacttcctgccaggctgaccactctgaacccgttgtcccaccccctctgtcagcacaaggaagctggcaatgagcaagtcaaccgtagggcatataccttacgggggcaggcgcatatccaaggaaactccagagtctgcttgcccgagcaccgcacatgctattcaacacgcataaaagaacgatcaacaccctgcaacacaccgtcgcccaacaggccagcctgctggacgctatcgagcgctccatggcggtgatcgaattcgacctgtccggcaatgtgctgcgggccaatgccaatttcctccagaccatgggttaccgcgccgagcaggtcgagggccagccccatcgaatgttctgtaccccgggctacacccgcagccctgagtacaaccagctgtggtcaaatctgcgcaatggccactcccagtcaggcacctttgaacgggtagccggcgatggtcagtcggtgtggctggaagccagctacaacccggtgcgtgatgacgcgggccaggtgaccaaagtggtgaagtacgcgatggatgtgaccccgcgcctgcaagccgaaagcgaagccaatgccaaactggacgccatcggtcgtgccatggcggtgatcgagttcaacctcgacggcaccatcatcaccgccaacgccaacttcctgcagcgcatgggttataccctggcgcagatccagggccagcatcaccgaatgttctgcagcgcggcgctggccagcagcccgacctacagcgacttctggaaacgcctgaaccagggagaactgttcagcggccagttcgagcgggtggataaaaacggccaggtcgtgtggctcgaagccaactacaacccggtgtacgacgccagcgggcggctgtgcaaagtggtgaagttcgccacggacatcaccgcccgtgtgcaacagcatgcggcggacgcgcagagtgcggcccaggcctatcacctgtccctgagcacccaggacatggcagagaaaggtgccgaggtgatccagaaaaccgccaatggcatgcgcgaaatttctgcggacatcgacgattcctcacaactgatcgccaagctcggtgatcgctcgcaacagatcactgccatcgttaacaccattcgcggtatcgccgaccagaccaacctgctggccctcaacgccgccatcgaggcagcacgtgcgggcgaacaaggccgtggtttcgccgtggtggccgacgaagtccggcaactggcggcacgcaccagcggctccaccacggagatttccagcatgatcgcgatgattcaggctgaaacccgacaagccatcgacagcatggacgccacccgcgaccgtgctgcccaaggggttgaaatggccaaccaggccggcacggtgatcctgcagattcgccaaggcaccagtgaagcggtgcaggcggtgagtgcgttcgccaacgagcggggcggcaactgacccgatcttcatacggagtgccgggggctcggtctatagtgctggttgttcttcaagcatgagatccgagcccgccatgaccccagaaaagcccgaagccacccccgtcgaccacctgcgcttccaccgcccccacgcccacctggcaccgaccttcggcaacgacacctttgccctcaaggccgaagccttcgcacgcttcttcggtacgccgaccttcctcggcgcacaaaccgccatcgtggtgttgtgggtggtactgaacatgaccggcatcacgcatttcgacgtgtacccgttcatcctgctcaacctggcgttcagcctgcaatcggcctacgccgcgcccctgatcctgctggcccagacccgccaggccgcccgcgacaaggcgcagtccgacgcggatgcgcagcaccgcgaagccctggcgattgccaacaccgagcgccaggcccaggcggcgcagaccaccaagcagttgctggaactgctggaacagaacacccggctcacggaaatgaccaaacaactgactgagcacattgaaagcctgacctgcgaaatgcatgagcactttgtgcgaaaaacctaaggcagtcgcacatgccgtcccagctcatcgaatagggtcaccaccgagcgcaacgctcggcagtccgggcgcgtgagcaaccacaacgcggtgtcatgccctgccaacgcagggcccagcgattgcaggccgtcgcccaatagaaagtccggcaaggccgccacgcccaaaccggcccgtaccagttcggtgaccgataacatgctgttgcagcgataactggggcgcacaccgggcagctgctcgcgacgccaggcgaccgtggggtggtcgggcaggaagtcatccggggcgacccaaggcaggtcggccaactcacggcccgcgtgctgacgggcaaaatccgcgctggcgcacacctgataagccacattgcccaggcgtcgacccaccagatgctccgggggcgtgcgggtcaggcgcagggcgatatccgcgtcacggcggctgaggttggcgaagtcattcgaggtactcagctccagggtcagtgccgggtagtgcggcatgaactgcgccagggccggcaacagcaaaccttgcaacaccgagtcggtacaggtcaggcgcaccgtaccgctgatcacctcaccgccctgctccacaccaatgcgcgctgcttccagggcctgttcggcacgctcggcctgttgcgccaggttgctcgccaggctggtgggcaggtagccggcacggcttttttcaaacaacgtctggcccagcgccgcctccaggcgtcgcaccgcgcggaacaccgtagacacatccacccgcaataacgccgccgcccgtgcgagcgtgccgccacgcaccagggcgaggatcagcgataaatcagggtaatccagtgaatagtgcgtagctgcattgagcatgtgggtaaacgccaatattgattgcgcgaacgccaatctatagtgcgccccaggacaccacaagccatgggatgtacaggatgaaaaccacaccgctgcacctcgccctgatcggcgattacaaccccgctgtcatcgcccaccaagccatccccgtggccgtgcaacaggccgccgaaatcctggggctgagcgtccatgtccagtggctcgacaccgctgccctgccccagtcactccacgctttcgatggtttctggtgcgtccccgccagcccctaccgcgacaccgatggcgcactgcgggcgatccgttttgcccgcgagcaacgccgacctttcctcggcacctgcggcggttttcagcacgcggtgctggaatatgcgcgcaacgtgctgggctggaaggatgccgagcacggcgaactcgcgccgcacgccaagcgcgccgtgatcgcgccactgagctgtgcgctggtggaagccaccgacaccgtgcgcctggtgccgtacacgcgcatcgccgaggcctacgacacccttgatctgcaggagggctatcgttgccgctacggtgtgaaccccgagtttctcgatgccctgctggaaggcaacctgatccccagcggccatgactcggcaggcgatctgcgggccgtggaattgctcgaccacccgttcttcgtcgccacgctgttccaacccgaacgcgctgcgctaaagggtattacgccgcccttggcaattgccttgctcaaggcttgccaggcagtgtcggcatgatcgcccgcacacccgccccgccctactacgcggtgattttcagttcactgcgcaccgagggcgaccagggttacagccaggccgccaaccgcatgctcgaactggcgcgcggacaaccgggatttctcggcgtggaatcagcacgggaagacgggttgggcattaccgtgtcgtattgggacagtgaggcggcgatcctggcctggaagcagcaggccgagcaccgggcggtacgcgaacaggggcgcaccacttggtactcggcgttccagacacgggtgtgcaaagtcgaacgggcgtacgccttcgaaagcggttgagcctttgggttgagagtgcctgatgatgaactggcttgcaggtgatgagcagggttgtttgtggttaacaggcttgttgtggcgagcaggcttgtttgtggcgagcaggcctgctcgccacagggttagctcaccaggctgcgcaacgcactgatctgcggaatctccacccgccgcatatacacccgcaacggctcggtgatgttgatacggtcgtcgatgttctggtccagcagcaactggatgcgctcgcgggacagggtcatggtctgttccggggccggcagccagacgaattcggcagtgggaatgatgccgtcatcggccacgtccatgccgaaggagtcttcgctgaaacgcacgatgtactggccggtcttgcggttgaggccaacaaacccgtggagttggtcggcggcctggcagataagctcggaggtgatgcgcatggtaaacctcactgaaaagtcccacagggactggaaagatggtttacacgcgtggcacaaagtaccgccctctaacggagcagcttcgggcaagagtactgcaatgcctgcaaaaaaaactcagaaaattgaggcgtgagcacgttaatgtcggtttggtgatagcgcctttcgcaatcaattgttaaaaaggaggccttctcaaagctacctccacgaaaggacttcgcatatgcctgtcacgtttaccaagagtgccttgctgctcgccctgatgctcggccttggccaggcacaggctgccgacccgatcagcccggctgaattggcaaccaacgaaggcattccgtaccccgccgtgatcgcccaccgtggcgcttcctacgacgctcccgaatccaccgccgcggcctacaaaattgcccgcgacctgggtgccgactacctggaaatggacctgcagcgcagcaaggacggcgtgctgttcgccctgcacgacaacaacctgcagcgcaccaccgacgtggctaccaagttccccgaccgcaaggacgccccggccaacgagttcacctggaaagagctgcaaaccctcgacgccggcagctggttcaacgccgcctacccggatcgcgcgcgtccaggtttcgttggcctgaaaatccagagcctggacgacatcatcaagatcgccgaaggcaacccgcagcacaaacccggcctgtacatcgaaaccaaggagcccaagcaattcccgggcatcgaagccgacctgaaaaacaagctgctggacaaaggctggctgagctccgccggttccaaactgggcaagagcaacaccggtgtcggccagggcaagggccgcgtcgtgctgcaaactttcgaggttgccagcctcaaagagctgcagaaagaaatgcccaacaccccgaagatcctgctgttgtgggtgggtgaaggcagcatcgagccgaaaaacaagcagacgttcgctgagtccggcgaaaccaccaaggccgcctactacgccaagcaggaaccgaaggatgccgccgagttcgaaaaatgggtcgacgaagccaagagcctcggcgccatcggcaccggcccatcggctgagctgaccaaccacggcgaccagagctattcggacctggtcaaaccggaaatgaacaaactgacccacgacaagggcctgctggtgcacgtctacaccgtcgatgagccggtggacttcgacaaagtgatgaaggccggcgtcgatggcatcttcaccaaccgcgccgccgaactgctgaagttctacaagcgctggccgtcgtccagcgtgcaggatctgctgaacgactataagtactgagtggtcagtgtgccattaaggatgagttaagttgcgccggttaatctggcgccacttaaacagctcaccgaagaaggacacacaccatgaaaaccttgaccgctctgttcgccgctaccgccctgaccctgaccgccggcctggcccaggcggatgttcgcccggaccacattgaaggcctgctcaagtccggcgccgtgatgcctttcgaaaaactcaacgcggctgccctggccaaacatgcaggcgccaccatcaatgacaccgagctggaccacaacaacagtggtgtgctggtctacgaagtcgaactgaccgacaccgctggcaagaagtttgaagtgaagctcgacgccaagactggcgccgtgctggaagacaagctcgatacttgatttgaactaaaaaaaagccacccttgggtggcttttttttgcctgatcaggcgctaagacgcgccgtcacctcattcaactcactcgacaacccacgcaggtcatggctcgccgcttcggtgcgcttcacgttgtcgaggttggccgtcgccaccgtggtgatctgcgtgatgttgcgcgagatgtcctcggccaccgaagtctgctcctccgcggccgtggcaatctgacggttcatgtcgcgaatcgcctccaccgcctgagtgatgtgagccagcatggcgccggcttgcgtgaccttctccacactctcatcgctgcacgactggccgctcacaatcgcttcagccgcgtccaccgcaccggtctgcaccgcctcgataatcccgttgatctcgatgatcgacgccgccgtgcgttgcgccaggctgcgcacctcatcagccaccaccgcaaagccccgtcctgcttcgcctgcgcgcgcggcctcaatcgccgcgttgagcgccagcaaattggtctgctcggcgatgccgcgaatcacttccagcactttgccgatgcgtacgctgtcggtttccaggcggcggatgatcgtgccggtgttgaggatttcgttgcgcatctggccgatggtggcgatggtgactctcatcacctcaccgccttcgcgggccgaatggtccgcctcgtcggccgcacgggaagcactggcggcatgacgcgcgacttcctgggcggtggcggacatttcggtcatggccgtggccacttggtcggtgcggttgaattgatcgtgggtgcccgtggccatctgcccggcgatggcgttcaactcgccgctggcgccgaccaggtcgctggcgctgcgctgcaagcggctgaaggtttcggcaagaaagtcgcgcaaggtatttgcggcggcggccaagtgacccaactcatcctggcgacggctggctacgcgctcggcgaaccgaccgtggctcagttgcgtcacgtagtcgatcaggctgcggatcggcaggatcaggttgcggttgatcaaccacaggctgaacaagccgatcagcacaccggacagcaacatgatcgccaaccccaccagcacggtgcgctcagcgtaggcgctgatggccttggattgctggctgccttgttcgcgcaggtcactgaccagcgcactcatttgctcgctggccgcgcggtccacgcccttcaccgccatatcgcccgcagtggcatcgccccccgccgccacgtaggcatcgcggcctttctggtaagccacaccgagttgctcgtgcgtctgacgcagggtttcgatgcgtcggctcaggctcgggtcgctgccggtctgggtgaccagccgagtgagaatgccctgcacatcgcgctgacgctcctggaactggccccagtatttctccatgtcctgaggctgcttgccgcgcaacaggacgtttttccattcctgcacctgcaccttgaattgcaggttggcctcgtcgatcaactgtgaggtcagcaacggcccatcgatcaaacttcgatagctcagcaccccattggacaggaagttgaaacaggccagggcgatcaacagcatcgccaacaggctgccaccgagcagcgacaggatttgtgctctcaaggaggttcgcaaaacattcatcggggaaaagcctcgatacaaggaagtggtgcatacacacggcgacttccctgtcatcaaaagcaccgccgatccacagcggttcttaacaccttgaatcggccgggccagaggcctcttgaacaactcctgacaggcggtcaaataaatgtcaccgcaacgaaataaatccaaaaccgtcacaaaactgtcaaattcccttgcaatgattcgcgcatgcgaacctgtgaaatctcctacaggcgcttttcctgcgagccctcatgaaccacagcatcgaccacagccaccaggactccgacctgttcggcttgctttacggtttccgttttcgccccggtgaaaagggcgagcagatcgattcggccacggccctccaggccttgcgccaaccggccgacccggacgagtttttgtggttgcacctgaacctggctcacgccgcgtgcgagcgctggatgcaggcgcatctggacctgccggaagagttcttcgaagccctgcatgaaggctcgcgctccacgcgcatcgagcatgtcgactcggccctgctggcggtggtcaacgacgtggtcttcaacttcagcagcatggtctcgtcggatatttccacgctatgggtgtgtgcgcgcagtcgcctgctgatcagcgcgcgcctgcaaccgctgcactcggtggacaagctgcgctcatcggtgaaggccggtgaaagctttcgctcgccactggccttgctcgtgcacctgctgcgtgaccagggtgaagtgctgacgcagatcgtgcgcaagaccagcatcagcgtcgaccatatcgaggatcaattactctcttcgcgcctgtccaccaaccgcgccgaactgggcgcggcgcgccgggtgctggtgcgcttgcaacgcctgctggcactggaaccgggctcgctgctacgcctgctcaaccgcccgccgcaatggctgcaaaaggaagacgtgaaggagttgcgcaaatccaccgaagagtttgcgctgatcatcaacgacctgatggccctgggcgaacgcatcaagctgttgcaggaagagatcgccgccaacctcaacgagcaaagcaaccgcacgctgtttaccctcaccgtggtgacggtgctggcgttgccgatcaacatcatcgccggttttttcggcatgaacgtgggcggtgtgccactttcccaagacccggaaggcttctggatattggtggcgttggtggcgacctttaccttgatcgccgggcggtgggccttcaggaagcgcaaagactactgagctgcaacaccgttgaacatgtgggagggggcttgcccccgatggcagtgggtcagctacagattagcttgctgacccaccgtcatcggggggcaagccccctcccacataggttctgcagcgtatacaggatcagcggctatcccaattccatcaaacactgacctatggcagcatctctgtaacattctgcaatgactatgaacgacatcctccccacactggatgccccggcatggccaccccttccctgactgcctccacccacgcctcacccgctgcccccaaacccaggctggacaagaaacccagcctggtgacggtgatcatcttctttgccgtgctcgccatgggcctgttgttcaccgcctacagcctgatgcacgacatgcacgaaatgggcgcccagctcaccacctggacgccatttttgctgctgggcgtggcgctgttgatcgccctgggtttcgagttcgtcaacggcttccacgacacagccaacgccgtggcgacggtgatctacaccaactcgctgccgccgcattttgcggtggtgtggtcgggctttttcaactttcttggcgtgctgctctccagcggcgcggtggcgttcggcatcattgcgttgctaccggtcgagttgattttgcaggtgggttcgtcggccggtttcgcgatgatcttcgccctgctgatcgccgcgatcctgtggaaccttggcacctggtggctgggcttgccggcgtcgtcgtcccacacgctgatcggttcgatcatcggcgtgggcgtggcgaatgccttgatgcacgggcgtgacggcaccagcggtgtggactggagccaggcgatcaagattggctacgccttgctgctgtcgccgctgatcggctttgcctttgcggcgatgctgttgctggccctgcgcgccttcgtcaagaaccgcgcgctgtacaaggcgccaaaaggcgataccccgccgccgtggtggatccgcggcatgctgatcgccacctgcaccggcgtgtcctttgcccacggctccaacgatgggcaaaaaggcatgggcctgatcatgctgatcctggtgggcaccttgccgatggcctacgcactgaaccgcaccatgccggctgagcagtcattgcagttcgccgccgtagccgaagtcacccaagtcgccctggtgaaaagtgcaccgcaagcattgaccggtgacccacgaccgatcctctccacttacgtgcgcaccaaggaagccaccccgcaactcgtccccgccctcgcagccctggccgggcagatcggtgatgaggtgaaaggctacggttccctggccaaagtgcctgccgaagccgtcggcaacgtgcgcaacgacatgtacctgaccagcgaaaccattcgcctgatggacaagggcaaggtcggcaacttcgacgccgacacccaaggcaagctgcaactgttcaagcaacagatcgacaattccacgcgcttcattccgctgtgggtgaagatcgccgtggccatcgcactcggcctgggcaccatggtcggctggaagcgcatcgtggtgaccgtgggcgagaagatcggcaagacccacctgacctacgcccagggcgcctcggcggaaatggtagcgatgctgaccatcggcgcggccgatatgtatgggttgccggtgtcgaccacccatgtgttgtcgtcgggtgtggcggggaccatggtggcaaacgggggcgggttgcagatgcgcacgatccgcaatctggcgatggcgtgggtgctgacgttgccggcggccatcgtgctttcaggtagcttgtactggctgttcacccaactcttctgacacaacagtgattgaacatgtgggagggggcttgcccccgattgcagtgggtcagctatagataagctggctggtccaccgctatcgggggcaagccccctcccacagttttatcctgcgaacagcccggacatcagcttcaaccgcttcttgtacacccgccgcgcctccaacgcctcttccagcgtcactgccacaaaccccgcccgctggttcggttgcatctgcccgatcaaatccaggtcggcactgatcaccgtgccgatcatcgcgtagccaccacccgacaccgcgtcccggtgcaacacaatcggctccaacccggccggcacctggatcgaaccaatcgggtagcaactgtcgacgatgttcgacggatccgaccccgcgccaaacggctgctcccgtggctggaagctcaacgcactgccgcccttgaagcgatagccgatgcggtcggcttcggaacccacggtccagggctcggcgaaaaagctgctttttgccacgtccgtcaggcgctcgtaatacagccccggcaccacgcgcagggtgacatccccgcccaccgaacggcgcaacgccatcggcaaactgttgcccgcacgccccgtgccactggcttcaccgatgggcaactcgtcgccttcctgcaagcgccgaccgtgaaagccgcccagcgcgccgagggtgtaggtggcgcggctaccgagcaccagcggcacatcgatgccaccggccaccgcgaggtaagtccgcgcccccgccttgggaaactcaaagcgcaacacctgcccggcacgcacctgaaacgccgtgtcttggtgcaccacttcaccgtccaggcgcggcgacatcaaggcaccactgagggccaccagcgcatcctgttggaattccagttcggggccgatcagcgtgcactccaggcccgctgcgcccaccgggttgcccaccagatggttggccgcgctcagcgcgtattgatccagcgcgcccgacggcgggatacccaggtggtagtaaccttcgcggccaaggtcctgcacggaggtggcgaggccgggtttgaggaccttgatcatgccagcgcctcctgcagggttttcggatagccaatggggtcggcgagaaaagcgtcgagggagaattccaccgggcggatgcgcaggtcgaaacgtcctgcgtccacctcggccaccgcctgatcgtaggcgtcgcggtccatgggtttgaactgcacgatatcgccggggcggaagaacaccatgtgctccttgaggtaggccaactgctgcgccgggtcatagatcggcgccggggtcacgccgaacatctggtaaccgccggcaccgcgcaccgagtaaatgcaaccaaagcagccgccatggccgagggtgagtttcggcgtatcggtgcgtgggcgcaggtacttgggcacttgcaattggcgctcgcgctcgaccatctggaacatgaacggcaagcccgcgacaaacccgaccatcgacacaaaccacggcgcaccactgtgggctgcgataaacgcgtcgacatcagccaggccattgatgcgtgcggcgtactccaggtcggtgccgctggggtcctggtggcggtcgcgaaagcgcatcagcgtttcgtgcgtccacgggtcgttgtacagcaccgggatttcgatgatgcgcgtgtgcagggtgcgttcggccacggcctgggcttcggcggtctgcaccgcatcgagcaatacgtgaggggcaatgcggtcggggtcaaagcgaatctggaacgatgcattggccaggcacacatccagcacgccttccagcgccaggcgttccacggcgcgggtcaccgccatgcctttgaaaaaggcctccagggacatgctgtcgctgacctcggcaaacaggtgttcatcaccgccaaatctgtagcggatgggggacgtttcagccatgtctgttcctcttggaatcgttgtagaaaggcaggcgaaaaataaggcgatgatttcttattgtggtgttttgaccgtgatgcccgcttggtccagcgcttcgcgggtggcttccaccagttccagggcacccggcgtgtcgctgtgcaggcagatggaatcgaattcgataaacaggtcttcaccttccacggtgcgcacaagccccgtctgacaggcccgcaggacgcgtgccgccactgttgcaggatccagcgcccgcacattgcgggtaaacacgatggagccggtcagatcgtactcacggtcggcatagaactcccgcacaaccggctgccccagttccgtggccgcacgccagatcaccgaattgggcatgcagtacagcagcaaggtcggctcgatgatttgcaggttctgcaccagcagccgcgcagcttcttcgtcgcgggccaggtgcatatacagcgcgccgtggggcttgatgtgttgcagggtcacgccctgggcgcgggcgatttcccgcagggcgccgagttggtagagcatgtcgtccaccagctcttgagccggggcgttgatgtggcgacggccaaagccgaccaggtcgcggaagcccggatgcgcgccgatggccacgcccaattgtttggcccgctcgacggtgcgacgcatggtgccggggtcgccggcgtggaagccggtggcgatgttggccgagctgatataggccatcagttccgcgtcgacgccatcgccgatggtccaggggccaaagccttcgcccatgtccgagttgaaatccactgcctgcatcgaagtcgctccgcctaagtgatagaggaaaagtaggctgcggcttgaccccttgggaagatctattatcagatgacccatcttctgaaaatcagatagccctatgttatggagaggccgatgtccctgaccttgcgccaaattcgttatttcgtcgccaccgccgagatcggccagatttcccaggcggccatccacctgaacatatcccaatcggcggtgactacggcgatcaaggagctggagggcatgctcggcgtgcagttattcgtgcgctcggcccagggcatgaacctcacggatgccgggcggcattttctcaaccgtgcctacgtgatcctgcgcagtgtcgatgacgcgctgaacagcccgctgcccgactaccgcgccagtggcgtgctgcgcctggccgccagctacacggtactcggctacttcctgccgcaccatttgcagcgcatggagcactggcacccggacgtgaccatcgaggtcttcgagcaggagcgccaggccatcgaacagggcttgctcgatggccagttcgacatggcggtggtgctcaccgccaacctcactcacccggccatcgtttcggaaatcctcttcaattcggaacgccgcctgtggctgcccagccaccacccgctgtgcgaacgcggcgccgtgagcctggccgacgtggcccgcgaaccctacatcctgctcaccgtcgacgaggccgaacacagcgccatgcgctattgggaacaggccgggcaaacgcccctggtgcggctgcgcaccagttcggtggaagcggtgcgcagcatggtcgccaatggcagcggcgtggcgatcctgtccgacctggtgcatcgaccctggtccctggaaggcaagcgtatcgaaaccctcaccgtcaccgaccccgtcacgccgatgagtgtgggcctggcctggcaccgcgagcgcgccttcaccccggcgatgcaggcggtgcgcaattacttccacgacgcgttcctggcgccgcagcaactctcggcacggcgttagaggtgggcttgcagggtggcggccaaccagtccatgaacacccgcacccgcaacggcaaatgccgctggccggcgtacagcagtgacacgtccagcggcggcgccgggtagtccggcagcagcgcgaccagctcaccgctggccaataaatcaccgatacccagggccggcacctgggtaatcccgaacccccccaggcatgccgccttgtaggcatcggtgctgttgaccgtcacgcgcccggccatgggaacgcggtgcaccttgttgcccagcaggtattcaaagccagccgaacgcgcgcccagcggccgcacgtaatgcaccaactggtgccgcgccaggtcggccaatgtctcgggcatgccatggcgttgcaggtacgccgcgctcgcgcagttgatcatcggcatgctgcacagcaggcgcgccaccacgctttggtccggttgcgcaccgacgcgcagcacgcaatcaaagccttcggcgagcaggtcgacctggcggtcggtggtgctgatctccagctcgatcagggggtgagcatgcatgaattcgggcaggcgcggcaggatcaattcccgcgccatcacgttgggcatgtccacccgaatgcgcccgctcagttgcgcttcatcctggcgaaacaagccttccaactcttccatgtgcgacaacaggtccttgctgcgctcatacaaaacccggccgtcctgggtcgcctgcaccttgcgtgtggtgcgttgtaacaggcgcgtgccgagcagctcttccaaggcttgcacatgctcggacacagtcgagcgcggcaggccaaggctgtcgccggcctgggtaaaactcgacagttcggtgacacgcacgaaggtgcgcagcagctcaagtttgttcatttgattgttcgcctaatccgaccagttattccggtataacgctgtttatcacgttatgggcgaataaatacactgggttccactgatcacccacgaggactagaccatgacccgtaaaatcgcactcatcaccggcgccagccgtggcctgggcaaaagcgccgcgctgcacctggcggcacagggcgttgacatcatcggcacctaccacagcgcggcggctgaagcccaagcggtggtcgcacaggtccaggccctggggggccgcgccgccatgctgcaactggatgtgagccagagcggcacctttgatgattttgtcggcgaagtcggcaccgtgctcaaagacgtattcgcacaggaccacttcaattttctgatcaacaacgccggcatcggtgcccacgccagctttgccgagaccaccgaagcgcagttcgaccaattggtggcgatccaattcaaaggcccgtttttcctaacccagaagctgttgccactgatcaacgacggtggtcgtatcctcaatatctccagcggcctggcgcgtttcagcctgccgggctatgcggcgtatgcgtcgatgaaaggtgcgatggaagtgctgacccgctatcaggccaaggaattgggcggtcgtgggatcaccgtgaacatcctcgcgcccggcgccatcgaaactgatttcggcggcggcgccgtgcgcgacaatgcggcgctcaatacgatggtcgccaacaacaccgctctaggccgggcaggcttaccggacgatatcggcggcgccatcgccgtcctgctggccgacggtagcaactggatcacggggcagcgcatcgaggcgtcgggcggcatgtttctgtaaaaacgtgtcgcgcagtacgtcatagccccagtgatagacataggtgtacggcaggaaaaacagcagtacaccgatgtcgagcatgaacgcctgcatcaggctgatgttcagccacgccgcgatcaacggcacggcgacgatgatcagcccgccttcgaacatcagcgcatgcagcacccgcgtccaaccaccgttggacagttgcaggcgcaccttgagacggtcgaacaggctgttgaagatgatgttccaggtcagcgccagcaggctcaggcccagggtcaccgcacccatttccagggccggtctgccagtgatccataccagcagcggcgtacagatcaacagcgccaggccttcaaaacccagggcttggcatacacgttcagtaatcgacttggtagggctcataacctgtgctctgtgaaggacgatggttgccatgattaccctttgaatcgatacttcataactaataaccatcgatcaaggcgatagtcatggcctcccacgaagtgctgcaagcgtttgtccaggccgccacccaagggtcgttttcggcggcggcacgcaagctgggcaagagccagtccaccgtcagcgcggccgtggcgagcctggaaattgacctggatgtgctgctattcgaccgcagcagccgcaagccgacgctgactccggccggccatgtgctgctgcaacgcgccgagcaggtgctggaggccagcagccgtttggaattggcagcgagccagttatcccaggggttggagccgaaactgaccatcgccatgtcggatacctaccaatccgatcgtttcgagatcgccctcaaagcctttgagcagcgctacccggaccttgaactggaatgcctgatcgccgaatgtgaagacttgatcgcccttgtgcaaagtgggcgtgcgcatatcgcatttatcgaaaagcaggaggtctacccacccgacctgacgggcgctccggtggaagaacgcacggaaatcgcgctgttcgtcgcgccgacacacccactggcacacctgcgcaacatctcgaccgacacgctgcaacaacaccgcgaattgcgcctggccagcattatcaacccgactgaaacccgcccaaccggccgggtatggtcggcacccagttatttgatgctgatggaaatggcgcaactgggcttcggctgggcgccgatcccgcgctggctggtggagcgttttggcggcgaccatctggtcgaactcaaagcccgcagttggccacgctcggtggccgtggatgcgctgtggtcacggcaccacccgccagggccggcggggagttggttgctcggcaagatgctcgagtaactctccaccaggaccagctctttcaaagtctttgaagagccagccatatctggctaataccattccattaaaggcgaacactgcaactgtggcgagcgggcttgtcccgcgttgggnnnnnnnnnnnnnnnnnnnnnnnnnnnnnnnnnnnnnnnnnnnnnnnnnnnnnnnnnnnnnnnnnnnnnnnnnnnncccaacgcgggacaagcccgctcgccacagggtgttaatcgccagttctacctaaagaccttgaaagggctgaccttaaggacgccatcgtcggcaagccgggctcctacaaagtcaggcggcctgaacctgcggcgggcggttgttctggaagtattcgtgcagggcactcaatgcgggcagcgccaatgtttgcgcggcgacgcgtcagcagccttgattcagagttcgaccagacgcttttcgataaacctgcgttcgggcgcctgctgggtcaaggccagcgcccgctcgtaggctgcgcgtgcctctgcgacgcgccccagttgccggcagaattccccccgcgccgaatgcgccaagtggtaatccagcaactcgccacgcgccagaatcccctccacctgctgcaagccctccaacggtccatcgcgcatggccagcgctacggcgcggttcagttcgatcaccggtgacggcgttgccctgagcaatacatcgtagagaccgacgatctgcggccagtccgtctcatcggcacgcgtcgcttcggcatgcaccgctgcgatggcggcctgcaggcaatacgggccaaagcgccgggtgcccagtgcgcgctccaccaacccacagccttcggcaatcaacgacgcgtcccacagcgagcgatcctgttcatccagcagcaccaactcaccctcggccgaggtgcgcgccgggcggcgggactcgtgcaacagcatcaacgccagcaaacccatgacctccggctcgggcagcaactccagcagcaggcgccccaggcgaatcgcttcgcgggtcaactcctcgcgggtcaggtcggccccgacggacgccgaatacccttcgttgaacaccaggtaaatcacccgcagcaccgcgtccaaacgctccggcagcgcgtccctggacggcacctgataagggattttcgcctcacggatcttgcccttggcgcgcacgatgcgctgggcgatggtggccggcgtggccaggaacgcccgggcgatttcctcggtggtgaggtcgcagatctcacgcaaggtcagcgccgcctgggcatccgccgccagcgccgggtggcagcaggtgaagatcaggcgcaggcggtcgtcttccacgtcttcatcgctccagtcagccgcttccagcgtgtcggcctgctcctgcaacaacggggtaaaacgcgcctgacggcgcagacggtcgatggccttgaagcgcccggtcgacaccagccaggcccgtggattggccggcacaccgtccagcggccagcgctgcacggcgacgaaaaacgcctcgtgcagggcttcctcggccaggtcgaagtcgcccagcaagcgaatcaacgtggcgagcacccgacgtgattcgctgcggtaaagggcatcgaccgagagggtcaatcgtgcataccctcggtcaccagcgtgaccagccgatccaggctctggccccagccatcgtgaaagcccatggcttcgtgggcctgtttgtcttcggcgctccagtgcatggcccgggcggtgtagagcgtcttgccatcgacctcgtcaaaggtgacttcagcagtcatgaacggcttgcccgagggtatccagcccggcatgaaggcatcggtaaacaccaggcgactgggcgcaacgatttccaggaacacgccctgggtcgggtattcggcaccgtccggcgcacgcatcagggtacgaaacaggccaccgacccacaggttcatttcgcactcgggggtggtcatgccgtgggggccccaccattgctggagcaaggcgggttcggtccaggcgcggaacacccggctgcgcggtgcatcgatcaggcggctgatggacagttcaaactcggcaggttgcgtagacatggggtaaacctcttgagtcttatggttgttgtgttcagagattcaattcacgcacggggcgcacttccacactgccgacccgggccgccggaataccaccggccacctggatcgcttcgttcaagtcgcgggcctcgatcaggtagaacccggcgagctgctccttggtttcggcaaacggcccgtcggtgatcgacagcttgccattgcgcatgcgcacggtggtggcagtgctcaccgactccaacggctcggcagccagcatgcgaccgctggcctgtacggactgcgcgtaggcgaagcattccgggtctgccgggctgtccggcgaggtgtgcaatacctgttcgttgctgtagatcaggcagaggtatttcatggatttctccgttttcggactactgactatagttcgcggcgctcacggtttcaggtcgaacagaccggtgccggtttccatgtcaaaaggcgcggaccagtgctcatgcaccaccttccactgcccgttgatgcgctggtaaccggcgctgacccgcatccagcatgtcttgagcacgccatccggcccggcgccaccacagtgggcgagccagtgggcaaaggcgctgtcttctccggcaacgatatgcagctcatgaaagtcgaaaataccggggccggggcaaaactccatgcaggccttccagtgcgcctggtaggcagccttgcctttgaattgcagggcgccaacggcgtcgaacgcgacgatatcatcggcgtaaaagctgacaatcttgtcgacatccttggccgtgacggcgtatttccattgttcgatcagggtgttgattgcagtgctcatggcgatactcctcggggtcgaaaactcacggaagacacccctagtcgaatggcccttcggcaaatcgacaacccgcttaaaaataatttcgccctcggcaaacccgctagaatccacgcctctttgtaggatttcggatgcaccaccgatggaaacccgcctcgttgcctatgagacgctgagccttgcgcagaaacagcaactcgacaccctgcaagtgcatcccgagcaactgccgtattccggcgatatctactgtgcgctgaacagcctgctggtcaaccccagccccggcgccatcaagggcttcgccctcctcgccgacgaaataccggtggccttcctgctgctcaaacgcccaccatgcctgccccattgggccgatgaacatagcgcgaccttgcatgcgttgcaggtggaccggcatcaacaagggcgcgggttcggcaaggcgtgcttgcaggcgctgccggcggcggcactggctgcgtggccgcagatcaagggcctggagttgtcggtggacgcggacaatgtggcggcgatggggttgtatctgagggctgggtggctggacagcggggaggcgtataaggggcggattgggtatgagcggaggttgaggtgggtgtttggtcaggccaaccttgacacgctcaaaatgtaacgtatacataacttaacaaaagctaagtaataaatacgtgacatggatacttctgtaatcactcatcgactcggcatccaactacgttccctgcgcctcaaccgtggctataagcaggccgatttggcgaaactggccggagttacccgacaaaaactgatcgaaatcgagaaaggcagcctctcggtctcgatgaatgcctatgcccgggtgactgcagcactgggcagcgaattcaaattagtgcctgtgaccctgccgacccttgaggaagtggaggatctatttaatgactaatcccaggttgcgtgttcacacacctcaaggtgatagcggcagcgtattgatgggtgccgatgactatctgtttcgctacggcgataacacgcaagcgcatagcgcagtcagcctgttgatgccggttcgcacagaagaatatcgccgccgagaactccaccccatcttccagatgaacctgccggaaggctacgtcctggagcaactgcgcaatcggctcgccaaaacggtcagagtcgacccgatgttgctgttggcactctcgggcagtagcgcgccgatcggccgggttttcgtgtcttcggatcaagtaaatgagctgatccatcgcaacagctctccggcaaccggagaaagtcttgacgaaattctcgcctgggatggcgcagaagacctgttcgtcgaactggtggatcgctacatcctgcgagcaggcatttctggcgtgcagcccaaggtgctggtgccggaaaagccgctgacacccgaacagaaattcacctcgaaaaccaacgacctgattatcaagagcgggcgcgacgagtttccggggttggccatcaatgaatacctgtgcatgtccattgcccgcgatgcaggtctgcccgtgccgccgttttacctgtcacaaaaccataagctgttcatcatgcggcgctttgatcgggacgaacacctcaacccactgggttttgaggacatgactacactgatgggcctgtccgccgaacaaaagtacaccaagagttacgccgccatcgccaaggccgtacgtgtgttctgtgccccggcctatcaacgcagctcactcgatcaattgtttgatagcgtggcgctgagctgcatcgtggctaacggcgatgcgcacctgaaaaacttcggcgtgctctatagcgaccccgtgcaatcggatacacgtttggcgcctgcttacgacatcgtcaacaccactgcttacattcctgaagacacattggcgctggacctgagtggaaacaaatcgctgttcgcctcacgcctgggcatcctcgaatttgccagaacctgcgaaatagaaaatcccgaaatgcgcatccaggcgctcctgcagacgcttgaagtcgtgctcaagcgcgaagacgattactgtcgattagcgcctgaggtcgcgaaagccattcggcgatccgctcagggttaccaacacagctttggcggctgaacacgcgcccgtattcatccaaggacaaggtgactctcatgctgacaactctcgaacaactcgaaaccctctacggcctcccccacgagcgcgccgtacgcaaggaaatcccgtttctcaatgaggactaccaggcgatggtgcgggcttcaccgctggtggtggtgagttcgtccgggccggacggcatcgacggttcgccacgcggggatgtgccggggttcgtgcggatcgtggatgagcgcaccctggcgattccggatcggccgggaaacaaccgcctggataccttgcgcaacctggtgcaggacccgcgcattgcgttgctgttcatcatccccgggatcggtgagacgttgcgggtgaatgggcgggcgcagatttgcattgagccgcaactgctggagagttttgcggtgaatggcaagccggcgcgctcggtgattctggtgcaggtggaagccgcgtatttccactgctccaaggcgtttgtccgctcggactgctggaacccggagaaacacctggaccgttcggcgctgccctcggcgggagcgtttcacaagcggctcaatgatgggcagtttgacgccgaggcgtatgaccgggagatgccggagcgggtcagaaccacgctgtactgatacctctgtatgagccggcttgccggctcatacacgggcaatcagcctctttctcccaccggcaaccagatctccaccgtcccggtgcccttgcgcccgtcaaaatccgcgctgtagcgctcgaaatccgcgcccatcaccttgtagcccgagtgcggcagccactcgaacatgatgcgttcgtaggtttgctccagcgcctgcaccggcccgtaatgcgggaacacggcatagttgagtggcggaatttccacgcattcaaagttgctcggcacgtcacccttggtggggacttcgaccccggccatgtagtcgaattcgccatggttggggttatggcaaacgccataggtcacaccgccgacgcgcttcttgatgtccttgatgcaggtgtcgaacaactcccacagcttagggatatcgcccacggtggccttcgaataacgcccttgtacaccggcaatcaccagggccttgcccgcttccatgcgtggctccaacggttgttttgtctgctgatccatacgaacagtctccttcttatgagggaacaaacccgtatcgagtataggggcatatccacgcggtactccatgcagaaaatttcctacacatctggacaactggccatcatcgaccgtattgtctgccccgcaggccaccgcagtggccgacgtcgctcggacggttccgggcgcttacgtactctcgaggcaacaatggccgaccaaggttcgccgcgccgctttgcgcgcatagatcgactccccccgtatgttttcaatatcactgccgagctgaagatggctgcgcgtcggcgcggcgaagacatcatcgacttgagcatgggtaaccccgacggcgccacgcctccccacatcgtggagaagatggtcaccgtcgcccagcgtgaagacacccacggctactccacctccaaaggcattccgcgtctgcgccgggcgatttcgcgctggtacaaggaccgctatgaagtggacatcgaccccgagtcggaagccatcgtcaccattggttccaaggaaggcctggcgcacttgatgctggccaccctggaccagggcgacaccgtgctggtgcccaacccgagctacccgattcacatctacggcgcggtaattgccggcgcgcaggtgcgttcggtgccgctggtgcctggcgtggacttcttcgctgagctggaacgggcgattcgcggctcgatccccaagccgaagatgatgatcctcggtttcccgtccaaccctaccgcgcagtgtgtggagctggacttcttcgaacgcgtgatcgccctggccaagcagtacgacgtgctggtggtgcatgacctggcctacgccgacatcgtctacgacggctggaaagccccgtcgatcatgcaggtgccgggcgccaaggacattgcggtggagtttttcaccctgtccaagagctacaacatggccggctggcgcatcggcttcatggtgggcaacccggaactggtcaacgccctggcgcggatcaagagctaccacgactacggcaccttcaccccgctgcaggtggcggcgattgctgcgctggaaggcgaccaacagtgcgtgaaggacatcgccgagcagtaccgccagcgccgcaacgtgctggtcaagggcctgcatgagctgggctggatggtggagaacccgaaggcgtcgatgtacgtctgggcgaagattcccgagcagtatgccgccctgggctcgctggaatttgccaagaagttgctgctggaagccaaggtgtgtgtgtcgccgggcatcggctttggtgagtatggcgatgatcacgtgcgctttgcgctgatcgagaaccaggaccggattcgccaggcggtgcgggggattcgcgggatgttccgggcggatgggctcgcccccaaaaccggcgcctgactcagtctaaatgtgggagggggcttgcccccgatggcggtggatcagtcaccagatgctgtgactgacactctgctatcgggggcaagccccctcccacatttgttccgcggtgtggcttagaccaccaacgacagcagcatgatgaaaatcaacgccaccactgacagaatggtctccatcgccgtccaggtcttgaacgtctcggccacggtcatgttgaagtactgcttcaccagccagaaccccgcatcgttgacgtgagacaggatcaacgaacccgcccccgtcgccagcaccaacagctcacggttaacccctggaatcatccccaccaccggcaccacaatgcccgcgccggtaatggtcgccaccgtggcagaaccggtcgccacgcgaatcaccgccgccaccagccacgccagcagaatcgggttgatctgcgcgttcaccgccatgtggccgatcacatcacccacgccgctggtcaccagcatctgcttgaagccaccaccggcgccgatgatcaggatgatcgcagcggtcggcgcgaggctggcgtcgagcagcttgaggatctgcttggagtggatgccctggcgatggccaaaggtgtacagcgacagcaacaacgccagcagcaaggcggtgatcgggtggccgatcatgtccatccagttgcgtaccacgttaccttcggcaaacgcgatgtcggcaaaggttttgagcagcatcaggaacaccggcaacagcacggtgaccagggtgatgccgaagctcggcaggtctttgttctcaggctcgcgggccagttgatcgaccagttcctgggacgggttgcccgggatgtacttggcgatgaacgtgccaaagatcgggccggcgatgatggccgtcggcagtgcgacgatcaggccgtagaggatggtcttgccgatatccgcgccaaacacgccgatggccagcagcgggccagggtgcggtggcaccaggccgtgcaccgccgacaggccggcgagcagcgggatgccgatcttgatcagcgacacgccggtacggcgcgcgacgatgaacaccagcgggatcagcagcacaaagccgatctcgaagaacagcgggatgcccaccaggaatgcggcgaacatcatggcccactggaccttctctttgccgaaggcgcggatcagggtctgggcgatctgatcggcaccgccggattcggccatcatcttgccgagcatcgtacccagcgcgaggatgatgccgacaaagccgagcaccccgccgaagccgtcctggaacgccttgatgatcttgtccacgggcatgcccgaggtcaggccgaggaagccggccgcgatgatcagggcaatgaacgggtgcaccttgaacttggtgatcagaacgatcaacccgatgatggtaaccactgcgtcgagcagcaggtaggactcgtgggacatgccaaacatggggggtctctcctgtttgttgttgttattaaagcgggtgttgaatttcctgccggggacagcgctatcttttccggcaaaaaatcagttggatggttcaaaaccgtgttgcagccaccaggtattggtctgctccgccagtgcctcgacgctgtctgcgctggcgttgagggccagggtcagcggctcgcccttgggcgattcaagggtggcgaactggctgtctatgaggctggccggcatgaaatgcccggggcgatgggacacgcggtcggcggcaacttcacgggtcagctccaggaacacgaaacccaggcccggcgcggcttcgcgcaggtggtcacggtatttctttttaagggcggaacaggtgagcacgggatgctcgcccgccttgagcgaacggcgcagttcatcgcacaggatgtcgagccagccggcgcggtcgtcgtcgttgagggggtggccggcgctcatcttttcgatgttggcggcggggtgaaagctgtcgccttcaatcgcggtggcgccgttaaggcggcacagggcctcgctgacactggtcttgccacagccggcgacacccatgatgaccagggcggtaacaggttgactcatgaaacacctcaggacgcagatagcgctacctttgcacgctgtaaggctagtgcaaaaacaggcttttcccgcgccgtcttgtcatttttatggagtgacgcgtgcatcctctccaatcatttgaaccggatcaggcaacccagcgttcaagcatttgcagctacttggagacagcgctaccttagtgcctcgatttttgtttggcaagccgcctgatgacctccaagaacgataaaaaaatgcgcaccacgggtcgcccgacccttaatgaagtcgcccgcctggccggcgtcagcccgattaccgcctcccgtgccctgcgcggcatcagcaccgtcgccaccgaactggtggaaaaagtgcagcaggccgccgccgaactgaactacgtggtcaaccccgccgcccgcgccctggcctcggcgcagagccattcggtggtggtgttggtgccgtcgctgtccaacctgctgtttatcgaaaccctcgaagccatccaccaggtgctgcggcccaagggctttgaagtgctgatcggcaactcccactattcccgcgatgaagaagaaaacctgttgcgcaactacatggcctaccagccacggggtttgttgctgaccggctttgatcgcaccgaaagcgcccgacgaatggtcgaggccagcaatgtgccttgcgtgtacatgatggacctggacccgaacgccggggtgaactgcgtgggtttctcgcaactggcggcgggtgagacggcggcggcgcacctgctgtcccgtgggcgcaagcgcctggcgtacatcggcgcgcaactggaccagcgcacgctgctgcgcggtgaaggtttccgccgcgcgttgcagcaggcgggcttgtatgacccggcgctggaactgctgacaccgcgcccgtcttccgtgggcctgggaggtgaattgttcctgcagttgctggcggcccatccggacgtggacgcgatcttcttcggcaacgacgacctggcccagggcgcactgctggaggccatgcgtcatggcatcaaggtgccggagcgcgtggctgtgctgggcttcaacgacttgccagcgtcgtcgttcatggtgccgcgcctgagcagcatcagcaccccgcgtgaggcgattggccggcgagcggcggagcatttgctgacgatcatggcgggtaacaaagtggccaagccggtggtggatatggggtttgagttgcaggtgcgagaaagcacttgatcaatgtgggagaggcaagccccctcccacattgctatcacccctgctagattggtccttctccaaatgccagggaagcactatgggacactcactgaaaatcttgggccgcacgtcctccatcaacgtgcgcaaagtactctggacctgccaggaactgggcatcgactaccagcgtgaagactggggcatcggctactcccctacccaatccgccgaattcctcgccctgaaccccaacgcccaggtgccggtgctgatcgacgaccacggcgtgctgtgggaatccaacaccatctgccgctacctcgtcggcctttaccaacgccacgacctgctccccgccgaacccgcaccacgggcgcgcgtcgagcaatggatggactggcaagctaccgaactcaacccgtcgtggggttatgcgttccacgcgctggtacgccagaaccccgactaccaggacccacagcgcatccatgccggcgtgcaagcctggaatgacaagatgggcctgctcgaacagcagttgatcaagaccggcgcctacgtggcgggtgatgagttcaccctggccgacatcctcatcggcctctcggtgcatcgctggcgcaacgcccctctggcgcatccgccctaccctgcggtgcaggcgtattaccagcgcctcagccagcgccccggtttcaaaacctttgccctcgacggccataactgagcacgctgcgggagaaagcatccccaggatgacgcgtttcaaacagtcgagattccaatcacttattgagtttccccatgcccgcactctccagtaccgacggcatcgacccgatccgtgccgcccacatcagcgcacgcatcgatcgcctgcccgccgttgcgaccgtctggcgccttgtcgcgctgctgtcgataggcggttttttcgagctgtatgacctgttccagaccgcgtatatcagccccggtctgatcagcgatgggattttccacaccggcagcgagggcgtattcggcttctcggaccaggctgcctttgcttcggcgaccttcctcggcctattcctcggtgccagcctgctcagccccatcgccgaccgtttcgggcgccgggcgatcttcacttttgccttgatctggtacaccgtcgctaccgtgttgatggggattcaaacgtcagcactgggcatcatcggcatgcgtttcctggtgggtatcggcctgggcatcgaactggtgaccatcgacgcctacctctcggaactggtgcccaagcgcatgcgcagttcggcgtttgcctttgcgtttttcatccagtttctgtcggtgccggcggtggcattgatgtcatggtggctggtgccgcaagcgccattcggcgtgtcgggctggcgctgggtggtgctgagcagtgcggtgtttgcgctgtttatctggcaactgcgcaagcgcctgccggaatcaccgcgctggctcgcgcaaaagggccgttttgaagaggccggggcaatcatcgacatcctggaagcacgctgccagaaagaccatggcaagccgctggatgagccggaaccggaagccgtcagcgtgcaaggcagtggccgctttgccgatatctggcaaccgccgtaccgccgtcgcgcgctgatgctgatcgtgttccatgtgttccaggccatcggcttctttggcttcggcaattggttgccggcgttgctgtcgggccagggcgtcagcgtgacccacagtttgctctacgccttcatcatcaccctcgcctacccgctggggccgttgctgttcgtgaaggtggcgaaccgttttgaaaacaaatggcagatcgtcggctcggcgatgggcgcgatgatcttcggcagcctgtttgccctgcaaaccacggcggtgggtctggtggtctgcggggtgatgatcaccttctgcaacgcctggctgagcttcagctaccactcctatcagagcgagttgttcccgaccaacatccgcgcacgggcggtgggcttctgctattcgttcagccgcttgtccacggtgttcagcagcttgttgatcggttttatcctcgagcatctgggcacgcctggagtgttggcgttcattgccagcagcatgctgatcgtgatgatcaccatcagttggttcggaccgcgtacgcggaacctggcgctggaaaacatcgcccactgagcaaggtagcattcggcggggggtcaatgtcgatggcacgtcccccccttcgttcgtagggcagttttatattgatcccgcctgactgtagcaaaccccgacactatcgaaacaactgccatgcctcacccaaccttggaacacgagtagctattagagctcttatatgaaatccatataaacctaattcaaaaattgccacacctctccagtaaaaagtcaaacaccgaactatgaatcgcttaccgcaacgaatctactgtcaacctttacagtagacaaaataacgcgcccatttacactcactccatctctaaaaagagagccccgctcaaactcaaacagaaaggaactcgccatgaccgcaaatacgaagccaatctccgcaagtttcataaccaataaaacgccaaaggccactgggcacttccaggtctccaagtcgcctcaaggcagtttcacaacagacacggtctttctgtcacagacagaacaatacaatatcgtggaatgctttattaaatggcccaatggagaagaagtcattattagtttgattgtcgaaaaaattccaggagagtcgaacggaacattcctcggggctggcatacgcccttggtccacttataacgctaaggacgccaacggaaatggtactttctactggtccgatcaaggctcctacagcatcgtttatatcccgaacatcaaacatgtcactggatccgtaacatccatctcaatacgtgacggagaagaagtcgaaattacatataattttgatgtttctgtctgaggttagaccttaaaacgccttgccttcgacatccatttaaatagggatcaaacgcagcccgaagctgccagtgtgccaaactggctttggaaaatatcgcccattgacggcaatggctggccgccggcaggacaacccttgccgcgtcggccacgccatccccaataaaaccgggcacttcacacccggcacgctatttgctccacctgtggcaccgcacatttccacaggtgaccgatcatgctggttaacaacaacacccaagccgtgtcgaccgttcaacagatcaaacggcccgacatggatcccgccaacgccgccgccagcgcgctgtacagcggtgccctgcaggccgcgcagcaaagcgtgaccgtgccggccgcgcagaaggaactggacaaggccgccgaccgcatcgacgaagccttcgccaagactcgtgtgcagttgcagaccagcgcgtcgacctcggatgtgccggctaccagcgccacctccggcgcacgtgccgagttcacagactacatgagcaaatctccggccgagcgtatccgcgagcaattgctcaaggagcagggtttgaccgaggcggatgtgcagaacatgtcccaggaaaagcaggacgctatttccaagcaggtggctgaacgcctgaagcagcagcaagaacagcaagtagcggcgaaaaccgctgagccgcaggcgcagacagtcaaagaaaccctggccgcgatctgacgccgcacaaccctgtaggagccccccgctcctacaggttattgcagttgcaacgtcgagttgaactgcccgatcgcgtccaccacatgccgtgacccttcctgaatttccaggatcacctgccccgcttcattcgccagttccacccccaggcccgtgcggctcaagctcgactgcatgctcgacaccgcgctcagcgacaggtcgtggttcttgcgcaccacatcgacaatctccaccgtcgcctggctggtacgtgccgcgaggctacgcacttcatcggccaccaccgcaaagccgcgtccatgctcgcccgcccgtgccgcttcaatcgcggcgttgagcgccagcatgttggtctgttcggcaatgctgcggatggtctgcacgatgctgccgatgatgtccgactgcttgctcaccgcatcaatgctttgcgccgcctggttcaggtcgtgggaaatttcttcaatgatctgcaccgtctgctgcaccacctccgagcccttgcgcgcacaggcgtcgttttgcaccgaggtggcgtgagccgagtcggctgcggttctcagggtggtgacctggtcggtgatgtcgctggcgaacttcaccactttgtacaggcgcccactggtgtcgaagatcgggttgtaggacgcctccaggaacaatgtcttgccgtatttgtttttacgctcaaagcggtgcgagtggtattcgccgcgattgagcgatgcccagaacgccttgtaggccggcgactccacttcgctgcgatggcagaacatgctgtggtgctgaccgacgatttcatccagggggtactgcacggttttcaggaagttttcgttggcgttgaggatctggccctggggggtgaactcgatcaccgccatggaacggctaatggcatcgatcaggctctggttttcatgttcatggtgaacccgcgcggaaatatccgacgcgaccttgattacgctctgcacgtgattgtccttgtccagcaccggcatatagctggcttcgagccacacttcctggccgtgcttgttcaagcgcatgaaggtgccgctgagcgcctcgccacgtgccaggtcgcgccataacttggcgtaggcatcggtgtgggtgtaagcctcatcgcaaaagatacggtgatgtttgccacggatgtcttcggcgctgtagcccatggtttggcagaaattgtcgttggcgtcgaggatcacgccggagggatcgaactcgatcatcgccatggagcggctgatggcggcgagtttggcattggattcggtcagggcgcaggaaaaacgttcaatttgttgcaggtcggatttgtgatggcggttgaacatgttcggatcaccctttcaaataccagcgcctggcaaggcgcattccattcacggattgaatattgctggcagatctttatgggaacaaccatccgaatcgctttataggccaagcgtcatcaacggttctggatgagcatagacagggcttgccgctacgcaaggtcactagtcaaccagcatttccaacagtgcgctgaccgcggctgacggtggacgactcggcgtgccgaccaaggcaaattcacgatactgaggcaccttcagcgccatcacccgcaggcccttgcgctggataggcagggctatttccggcaccagcgtgacgccaaccccctcgcggaccaggctgaaggcactgttccattcgcgcacttccactcggacatcccgcagggtcagacccgctgcggcccccaggctgcgcgcattggcggtacaaccaccggtagccagtacgaaaggctgctcaagtaactcctcaagcgacacacacgcatcagtcgggcgttgcgccagcacatggtccaccggcaacacggccatccataagtcacggcccaacacggtcgcattgcgctcaggcgtggggttgagcaccacgcccaggtcgacgaggccgctatcgagcaaggtgagcacttcgttgtcggtgacatccagggtggtgacctcgataccgggatagagctgcgcaaaacgctgcaatgcgggggtcagaaacgtcgccagcaccatcgggaaactggcgatgcggatcgtcccacgcaacatgggcctggcttcatccacagtgctgcgaatcgcctgcaaggcgccgagcatcacccgcgcctgttcgatcacactcaagcccagggccgtgggcaaggtcttacgcggttcacgggtgaacagttgcgcgcccaacgtcgcctccatgcccgccatggcctggctggcagcggactgggtcatgcccacgcgctcggcggcagcggtgatgctgccgtgatcggccacggccaccagcaggcgccagtgcatcaggttcatcatggcagtagctgtccttatggcgggggtctgaaggtttaattttacgcacggtgccacgcccgcgagactggcgcaaattcaacggagctgcctcagatgaaactgtatttcttcccccacgcctgttccctcgcaccgcatatcgtgctgcgcgaattggcgttgccgttcgacctggtgctggtcgataaccaggccaagaccaccgccgagggcgaagacttcctgcagatcaaccccaagggttatgtcgccgccctgaagctggacaacggccaggtactcaccgaagccagcgcgatcctgcaatacctcgccgacctgaaacccgccgccggcctggctccggtcaatggcagctgggagcgggtgcgtttgcaggaatggctgaattttatcgccaccgagattcatggtggcttggcggtgttcttcaacgacgcgatccagggcgacgtgcgcgcgctgttcgaggccacgctgttcaaacgtttcgcggtgctggtgcaaacgctggagcgccaggattacctgttggggtcgcactactcggtggcggatgcctacctgttcgtggtgctgcgctgggcagcattccacgcgattgacctgggccagtggccggcgctggcggcgtttcagcaacgcgtgggtgagcgacctgcggtggttaccgcactggccgctgaaaacccatgagttgagacgaagctgctcagcgccagcacatccagcgagcccgagcgatcctgatcatgcgtattcacctgtaaaccatgcccccggttagatatgtaaacgatgtccccggtttgtaccggggcaagcccgctcaccacacattcatggcgccttgaagacggcttgctgcacgtcgacctttttcgggatcaggccgttggcgaagaacaggtccgccgtgcgttgctgggtagcgacgtccgaggcttgcagcggccggatcggcgcgggcgagcggtgttcgaagtagcttttcaccaccgccggttgcaggcccagggtcttggccatcagtgcaatgctttcttcaggcttgtcgagggacaggcgctgcgccttgcccagggtctggatgatcgtgccgatggactgcgggtactgcttggcaaacgcgctgctgaccacaaaaaaactgccggccggattgaggccttggccgtcacccagcacacgggcggagccgtcgaccacggcggcggagtagtacgggtcccacaccacccaggcatcgactttgccttgctcgaacgcagcacggccatcggacggcgacaggtacaccacgttcacgtccttccattgcaggccggcgcgcagcaggcttttgaggaacaggttgtgtgcgctggagcccttgagcagcgccacgcgcttgcccttcagttcagccacgctctgcacggggctggccttgggcaccagcaccgcttcggtcttgccctcgttgggctcgacggcgaagtactgcaggtcgataccggcggcctgggcaaagatcggcgggatgtcgccgatattgccgatgtccaggctgccgccattcagcgcttcgatcagcggcgggccgccgaggaactcgatccactgcacttgcgtgccgggcagcgccgcttcgaagagtttgtgctcacgggccagcaccatgctcaccgagcttttctggtagccgatacgcaaggtggagggctcggtcgccagcacctgaccggcgatcaatgacagtaccgccgcagcgaagactttaagcatcagagcgcccccttgaccttggccgcgacatccgccggcacccattgctgccagacatccggatggtccttgaggaaggcttcagccacctggcggggcggcgtgcgtttctcgctcatgtcgccgaggatgccgttgagcaaatcaatcggcaggtcgaccttttcaaacacgctcaccagttgcgggtactgcgccttgaacggtgctgacacaccaatcgccaggcgcgccggcatcgagcgggtgccgatagggttggggtttttcgcgtcggacagggtcttccaggcgtcggcgttgaacggcggctcttccagcttgaccagcttgaagcggcccagcagcggcgtcggcgaccagtagtaaaacaacaccggcttgccgcgacggatcgacgacgccacttcggcatccagcgccgcaccggagccggtgcggaagttgacgaagctgtcggtgagcttgtaggccttgagtttctggctgttgacgatctccgaggtccagccggtggggctgttgaggaagcgcccacggctcgggtcttcggggtcgcggaacacgtccttgtagcgcggcaggtcggccaccgacttcaggtccggcgccaggggcttgataccccgcgcggcatcgcccttgatcacgaactccggcacccaccagccttcggtggcgcccttgaccgtgtcgcccaggccgaacaccttgccctcgttttccgccttgacccacgccggactgcgcccggcccattcttcgccgatcacctggatatcgtccttggccagggcggcttccaggctcacggtgctaccgggcagggtgtcggtgggcaggccgtagcccttctcgacgatcaggcgcagcacctcggtgatcaggctgccgctttcccaggtgatgtcaccgaagtggatgggtttgacggcttcgccggcatggacggttggggacagcaggctcagggccagcaggccgccgcccaggagtttcttcagatgcttcatcggcaacctcatagttgtgcggtgatgttcgttaaaagtcataactgggccgcgtgtaattcgccgctcaggtcgtcgttcattccaggcacagcctcaggcgacggttgaaggcgcgggtcatgtagtcgctgaccgaacgctgggaaatccccagctcggcggcgatttccgggtaggtcaggccattgagctgggacagcaaaaaggtcgccttgaccttggcgggcaagccgtcgagcagatggtcgatggcttgcagggcttcgagcatttgcgccagcgcttccggggatggcgcgacggaggtctcatagttatcgagagcgtcgaggtaggcgcgctccaggtcacggcgacgccacagttggtacatcaggcgctgggcgatggtggtgagcaaggcgcggggctggcggatcggcaccacgcccggcgcactcaggagctggacgaaggtgtcggcggcaatgtcttcggcgtgggcgcgggaatcgaggtggcgctgcaaacggctgcacagccagtcgtaatgactgcggaacaatccgcccacgtaatcgctgtgagaagtgtcggcgccggacatagtggctccatctgagaaggttgcacgttatgtccggtgttccggtggagcgatcctaacaaggctgcttattctttaataatatttaaaaggtatttttatataaccttattgaattatcggataacccgcgttgacggcctgatcctgatagctcaagagcaccgcatagtcgtcttcgctggcgcggagcacttcgtgcaagcccagtgtctcggccacctcgggcaagtcctgcaacgcctggttcatcgcccagcggatctggaccacctgttcatcactcaagcccaacgggccgatatagggcaaggtcgggctcggcgcactgcgggtaacgatgcgcagccccgccacctcccgtggcgcgaaacgggcgaggtagtcgtaggtcacgctgtcgatggcggcgaggtccgcacggtcttcgcgcagccagcgcaggctctcgcggtgggcgccgctgataccgacactggcgaagaaccgcccatcgcgttgcaggggtgcaaggcgttcgcgcaacaggttcatgccgctgttggagtcgtggccgttgatcacgccacggctgttgtagaagtccgccaggcggtggcgcgggttgtcgtcgcgggtcagcaacaggctgcaatgttcgccctgccggctgtggggcagctcatagcacgggcggccgatcacccggaccttgccgcgcaactgggtcatcagtggataaccgcaggtttgggtcaccagcaattcgggagccagccacagtccgggcaagtccagatgatcggcgtcgagacgacgccggcccaggcgttccaggatgcgcgacaaccactgttggttggcctgccggatcggctcgggcgcgacatacatcagcagttcggcgtagtgctcactcatgctcgtctctcacgcaaaggggtgccgggggctgtcgatggccttgagcccgtggcggccgatcaactggccgtagccttgcaccaggaagccaccactgcgtgcgatccattgttcacgccgggcgcgataaaccgtgggcagcaagtaccaaggcagtttcggcaaatcgtggtgcaccaggtgcaggttgttattgaggaacagccaggtccacggccaggacgcttcgttgagcacgctgcgttgctcgggccgggggtgcgggcggtgttcatagtaggaacggatcgaggccagggacaaggccggcacgctgaccagcagcaggtaatgccccatcgacagcgcgctgtagtgggcgatgaaacccagcatcagcacggtgataacaccgtgggccagccacatcggccacacctggggcaggcgctggcattcgtggcggatcaggcggccaatcgccaaaggggcagaaagcaggaagcggccgagcacggtcttggtcaccccatgcacgcagcgttcgaacagcgagctgtggtcccattgctgctgggagaggtagcggctttccgggtcgacgcccggcagggtcaagtcttcgtcgttgtggtgtagcaggtggctgtcgcggtacagcgtgtaggggtaccacacggcaaagggtgcatagccgaggattttattgagcagcagcgaacgggtgggatggccgtggagcagttcgtgttggaccgacaaccacagcgtcacgatcgggatcaacagcagtgtgctcaaccacaggcccagccaatggctgccgaggatcacggcgaaccaaccggcgtagatgccgatcaacagcaaccaggtcggccactcggttctggcggtaaagcgttgggccagggtttcgatttcccggcgttgggcaggatcaaggtagtgggccatcggcagctcagagcaggtgtttcctgctctgtgcaatggcgcgggaaaatcttgcagatcgtttggttctaagcttgtaactcagtgaccgaacaggcctgtctcggttttcttggctttcttgtcggcgcgtttttcatccgcggtctttgccggttttttcttcgcggctttctttgaatccatacctttggccatgatgcgtactccactttaaggggttgcagtgatgggtataccacctattgccgcgcacaaggcgtttataatccccggcccttgataacgctgcctgaagaccatgcccccattgcacatcgaaccgttggccgagccgctgtggccgctgctgaacaagttttaccgcaaccacaattcgtcgatgaaggcactcaagggcgggcgtttgtgggtggcgcgcgatggcgagattgttgccggcctgtgcctcacgcccgtggtcggcgggcagtggctgaccggggtgttcgttgacccggcctatcgcggccaagggctggcggcgcgactgatcacggcggcggcggccgatgtggacggtacgctgtggttactgtgccatccggaattggaagagatgtaccggcgcatgggcttcacccaggacacgctgttgccgcagtcgctcaatgaacggctggtgcgctacaagcgcaacaaaccgatgatcgcgatgggcttagatcgtttggtgaggtcgacctcggataatgtgtgatccgcgcgtacagggcccatgctagcctcggcggcacagtggccctttacaggatgatcatgaaaacgacgctcgcagctctctccctcactgccctgctcgccccagccttgagccaggccaccgacgccgcgatcagcgcccgacagtaccaaagcgtactggccggcagttggcgcgacccggccaacagtgcccgcgacggctatcgccacccgcagcagaccctggaattctttggcctgggcgccaagcaaaccgtgatcgagatcaccccgggcggcggctggtacagcgaagtgctggcaccgctgctcaaggatcacgggcagtacatcgccgccgtgcaagccgcgagcagcagtgcttacgcgcgcacgtcggaagagaacctgaagaagaaattcgcggctgaccccgcgcgctacggcaacgcctcggtggtggagttcgatcccacggcgccggtattcggcaaacctgcatcggcggatgcggtgctgacgtttcgcaatgtgcataactgggtagcggcaggcaccgcgtcggccacgttcagtgcgttctaccaggtactgaaaccgggcggcgtgctgggtgtggaagatcaccgggccaaggacggggcggatctgcaggcgatcaaggacagcggctacctgaccaccgcccaggtagtgaagctggcaacggatgccgggttcaagctggcgggacagagcgaggtgaatgccaacccgaaggacaccaaggattacccgggtggggtgtggacgttgccgccgacgttgaagttgggggagcaggataagtcgaagtatgtggcgattggtgagtcggatcggatgacgttgcggttcgtaaagccggccaaataatgctcaacctgtaggggccggcttgctgtggtgagtggggttcgtccgccaacccgaggggctgcttcgcagcccagcgcagggcaagcctgctcaccacaacaaacctgctcaccacaatcagcgcgtttgaaagtcagtcgtcggcagtggggtccatgtccgggaacatcacctcgataaacccgaacttgctgaagtcggtgatccgagacgggtacaaccggccgatcaggtggtcgcactcatgctgcaccacccgcgcatgaaaaccgtcggcaaaccgtacaatcggctcgcccttgggatcaaacccttcgtagcgaatctgttgataacggtttaccgcgccccgtaggccgggtacggacaggcagccttcatagccctcttccagcaccgggctgaggggggtgatcagcgggttgatcaggatcgtctgcggcaccggcggtgcgtccgggtagcgttcgctggcctcgaaaccgaagatcaccaattgcaggtcgacgccgatctgcggtgcggccaggccgacgccgcccacatgttccatggtctggaacatgtcatcgatcaattgccacaactcggggctgtcgaacatttccggcggaaccggaggcgcgatacgcagcaagcgctcgtcgcccattttcaggatttcacggatcatcgatcagacttcgtcaggggtgggcttggagtggtcccggccgaggcctgagacgtgctgtttttcatcagtgtggccgggttcgtcgaactctttttcaccggggtccttgccctcggcggacatgtgctcgatcactgcattcatctccgcgcctagcaacagcacggcggcggaaatgtagaagtacaggagcaacacgatgatcgcgccgatactgccatacatggcgttgtagtcggcaaaggttttgacgtagtagccaaagcccagggacgcgacgatccacaccactaccgccagcacggagcctggggtgatgaagcggaatttctgctcgacgtccggcatcacgtagtacatgagtgccacggcgaacatcagcaaaatcacaatcaacggccagcgcaggatggtccacagggtcaccacgaactcctgcatgccgatctgcccggccagccattccatcacttgcgggcccagcaccatcagcgcagcagcggccagcaacatgccggcgatgccgacggtgtagaaaatcgacagcgggaagcgcttccagatcggccggccttccaccacgtcgtaggcggcgttcatcgcgctcatcatcaggcgcacaccggccgaggcggtccacagcgcaatcacgatacccaccgacagcaggccacccttggattgctgcaactggtcgatcaccgggttcacctgctcgagggcctggggcggcaacaccagttccgactgcaggcgcagccaggtgaagaagtccggcaggtgcaggaaaccgatcagggcaatcaggaacaacaggaagggaaacagcgagaacagcatctggtaggccagtgcagaagcataggtaggcatttcgtcatcgacgaattccttgacggtacgcaacagcactttgtgcagcttgagaccatcgagaaccggaaaaatcatagcgtctcctttcgccgcaaaaagttgagtttgtgggcgactcaggggccgttttctacatcaaggtagcctatttggcgaccttgaaacaatttcgaaactttaatcacgccgtgtgacataaaaacggccatccgtggatggccgtttggactgcttgaaagcgcgtttacttggtcgcttttttcactgcgtccttggtgtcgcctaccgctttctgcacttcgcctttcttttcctgaatgacgccttcagcgcgcagtttgtcgttgccggtgactttaccgacaccttgcttgatattgccgaccgcctcgtttgccacgcctttaatcttgtcagatgtgctgctcatggtatttctccgaaagaacaatcaaggtttttgggtcattacctaaagattgacccgaggccgttgcgcagagtttcaaatatttttacccaggcatttcatcgccgaccgcaggtttggctttatgttttgcggccaacccacgagaatgcccggcacattcaggctataacgctgaataacagatcccgtaggaaggttatgaaactcaataaagcacaggccatcgcccgcagaaacaccgaactgggcggagccgtactcggcgtcaacaactgccacttcaccgacctggaccgcaagcgcaacatctggtggttcgacctgccggtgggccggattgccgtgggccagtacgagtggatccacctgttgatgcacaacgccgagaccgaccagttgttgcacctgaaggtgccaacgctgttcttgcgtgaaaagctcgaaggcctggtggtacgcaatgcgggcaagcgcaaaccggagatcactctggagctgagcgcggacaaggattcgttcttgaaggatgtgcgtccggcagggactggcgtgagcttcgcgcagttcgccctgtaaaaaacgctgttcaaaatgtgggagggggcttgcccccgatagcggtgtatcagtcagcacatcggtagctgacacactgccatcgggggcaagccccctcccacattggtagagcgttactttttaagaccgagcttcttcaactcttcatcgcgcagctcacggcgcaggatcttgcctacgttggtggtcggcaacgcatcgcggaattccacggccttgggcactttgtacgcagtgacgttggcgcgcatatgctccatcacctgctccttggtcagggtggcacccggcttgaccacgatgaacagcttgatgtgctccccggacttttcgtccggcacgccgatggccgcgcactgcagcacgcccggcagacctgccagtacgtcttccagctcattggggtacacgttgaagcccgagaccaggatcatgtccttcttgcgatcgacgatgcgcatgtagccgtcaggctggatgatcgcgatatcaccggtcttgagccagccttcgctgtcgagcatctcgtcggtggcgtcctggcgctgccagtagcccttcatcacctgcgggcctttgacgcacagctcgccggtttcacccagtgcgagttcagtgccgtcatcggcgatgactttacacacggtggacggcaccgggatgccgatggtgccgatctggatatgctggatcgggttcacggtagccaccgggctggtctcggtcatgccgtagccttcgcaaatgccacaaccggtcaccgccttccagcgctcggccgctgccaattgcagggccatgccgccggacagggtgactttcagcgcagagaaatccagcttgcggaacgcttcgttgttgcacagcgccacaaacagcgtgttcaagccgacaaagccgctgaacttccacttcgacagttccttgaccatcgccggcaggtcgcgcgggttgctgatcagaatgttgtggttgccgatcagcatcatcgccatgcaatgaaaggtgaacgcatagatgtggtaaagcggcagcggcgtgatcaggatctcgcagccttcattgaggttggagcccatcagcgccttgcattgcaacatgttggcgacaaggttgcggtgggtgagcatcgcgcccttggccacgccggtggtgccgccggtgtattgcagcacggccacatcgccgctggccgggctggcatcgctgaccggttggccgtgccccttggccagcacgtcgttgaacttgatcgccttgggcaggtgatacgccgggaccattttcttcacgtacttgatgacgctgttgatcagcaggcgcttgagcggcggcaacaggtcggcgacttcggtgacgatcacatgcttgacggcggtcttgggcacgatcttttccgccaggtgcgccatgttggccaggcacaccagggccttggcgccggagtcgttgaattggtgttccatttcccgcgcggtgtacagcgggttggtgttgaccacgatcaggccggcgcggatcgcaccgaacacggcgaccgggtattgcaggacgttgggcagttgcacggcgattcgatcgccgggcttcaagtcggtgtgctgttgcaggtacgcggcgaaggcgccggacagttcgtacaattcaccgtaggtgattgtcttgcccaggttgctgaaagccggtttgttggcgaagcgctggcaggactgcttcagtaccgcctgaatattcggatactcgtctggattgatttctgcggcaatcccggcggggtacttatccttccaaaagtcttcgttcatggaagcccactcctcagcgacgtcagcgacgcgaattcatcatcgcatttgatgcgattattattggtgtatgtttttttaggtgaatctggcgctttcaagcaggccgagacgtcacaaagcgcgccgagagtagcagctttgccaaaggccgcctagagccaaaagagggggccacggtcataaacacgactgtcctacaatatttggtcacactttaaaccaagctgaaatagcccgataaagagctctggaacagggctttcagaacagcaaggtacaaatgtgggagggggcttgcccccgatagcagtggttcagtctacacatctggtgactgtcccaccgccatcgggggcatgccccctcccacaattttcagcacatttcagatcaagcgatatcgcgcagctccctgcgcaagatcttgcctaccggcgtcatcggcaacgagtcgcgcaacacaatatgcttaggcaccttgtacccggtgaagttggtcttgcagtacgccttcaactcctcaaggctcaccccttcggcacgcgccaccacgaacagcttcaccgcctccccggtgcggtcatccggcacaccgatcacggcgcagttggccaccgccgggtgggccatcaccacgtcttcgatctcgttggggtacacgttgaaacccgagacgatgatcaggtctttcttgcggtcgacgatgctgacgaaaccatcgacatcgatcaccgcaatgtctccagtcttcagccagccttcggcgtccaacgcctcggcagtggcgaccggttgctgccagtagcccttcatcacctgcgggcccttgatgcataactcaccgcgctcgcccaacggcaactcgtgaccttgatcgtcgatgactttcatcgcagtgcccggcaccggcaggcccacggtgcccaggcgcgactggctgccgtaggggttggtactggccaccggcgaggtctcggtcaggccgtagccttcaccgatggagcagccggtgatggccttccagcgctcggccgtggccttcaccagtgcggtgccgccggaattggtgatcttgaggtgggagaagtccagggtcttgaagtccggatggtccatcaacgccacaaacagcgtgttcagccccagcaggcaggagaaccgccacttcttcagttccttgatgaaaccgccgatatccctcgggttggtgatcaacacgttatggttgccggtcaccatcatgcacatgcagttcgccgtgaaagcatagatgtggtacagcggcagcggcgcaatcatcacctcctgcccttccctcaccagcggctgtccatcatcggtgacctgggacatgcacgcccgcgcctgttgcatgttcgccaccaggttgccgtgggtgagcatcgcgcccttggccaggccggtggtgccgccggtgtattgcagcaccgcgatgtcgtccagggtcaccgggtggcgggtcacgcccaggcccgcgcccatgcgcagggcgcgcttgaatgacaccgcgcgcggcaggttgtaggccgggaccatcttcttgaccttgtcgaccaccgtgttgatcagccaacctttggcagcgggcatgaaatcgcccatcttggcttcgatcaggtagtcgatctcggtgtcgctgcacacctcctgcacccgcgaaccgaacaggttgaggtagaccagcgcacgcacgcctgcgtccttgaactggtgacgcatctcgcgcggggtgtacagcgggttggtgttgaccacgatcagcccggcgcgcaaggcgccgaacacggcaatcgggtaatgcagcacgttgggcatctgcaccgcgatgcgctcgcccggcttgaggtcggtgtgctgttgcaggtagccggcgaaggcggcgctctggcgctccagctcggcgtaggtcagggtgatacccatgttgctgaatgccggacggtcggcgaaggccttgcaggagcgctcgaagacttcgatcaccgacttgtaggcagagaggtcgatgtcgttgggaacgcccgctgcgcgtttgtcattccagaaatcaggttgcattattcttgtcctcttacctgagtgtgtccggccgctttctgactgctatgaaaagcggagctttggggacgttagcagcaatagccaaacaggcaaatacagcaaaccgtgtcattgattgtatgaatcttgccgctgacgtgtaggcagatgcgccgatcctcggcagatgagctatacactgcaacaaccccgagctgaccttgagcagcccctgagcaaaggaaccgccatgaaccacagcaccttctggctgaccgcgaatgaccgcagccgcctgtacgtcaatcaatggatgcccgaaggcccgaccagggccctggtgatgctgtcccatggcatggccgagcacagcgggcgctatgcgcgcctggcgcacaccctgtgcgacgccggctacggtgtgtatgcgccggaccaacgaggccacggccgcacagccgacgaaggcaccctgggcctgtacgccgagcacgacggctggaacaaggtagtgggcgacctcgccagcctcaaccagcatatcggccagcagcagccagggttgccgatcattctgttgggccacagcatgggcagttacatcgcccaggcctatctgctgcaccacagcgccagcctggatggcgcgattctcagcggttcgaatttccagccagtggcgctgtaccgcgccgcgcgggtgatcgcccgggccgaacggctgcgccaggggttgcgcgggcgcagtgcgttgatcgaattcctgtcgtttggatcgttcaacaaggcgttcaaacccaatcgcaccgctttcgactggctcagccgtgacccggccgaagtggacaagtacatcaatgacccgctgtgcggcttccgctgcaccaaccagctgtggatcgacctgctcggcggcttgcagcaaatcagcaaagcgtccaatctcgcgcagatcgatccgggcctgccgatcctggtgatgggcggtgaatgtgatccggtgagcgaaggcaagcgtctcaacagcctggccaacgccctgcgtgaagcgggctgccagcacctgcaactgaatatctacccgcaggcgcgccatgaagtgttcaacgaaaccaaccgtgatgaagtcacggcggatgtactcagctggctcgaccaggccctgacgttgcgcaggcccacccgctgcgaataaattttcgattaaaatcagtcagttaaattaccgattagccacaggatgcacgtttagatgacccaggtaaccaacaccccgtacgaagccctcgaagtcggccagaccgccagctacagcaagctggtggaagagcgtgatatccagctgttcgccgccatgtccggtgaccacaacccggtgcacctggatgccgagtacgccaaggcgaccatgttcaaggagcgtattgcccacggcatgttcagcggcgccctgatcagcgcagccgttgcctgcgagctgcctgggccgggcacgatctacatcggccagcagatgagcttccagaagccagtaaaaatcggcgacaccctgactgtgcgcctggaaatcctcgagaaactgccgaagttccgcgtgcgcatcgccacccgtgtgttcaaccagcgcgatgagttggtggtggatggcgaggcggaaatcctggcgccgcgtaagcagcaggttgtgacattgaccgagttgccgccgatcagcattggctgatagcaatttcaggctcaacacaacaccaatgtgggagggggcttgcccccgatggcggttgatcagtcaatgaatcggttgactgatactccgccatcgggagcaagctccctcccacattggttacagcatttacaaccctgggcttacgactgagcgcgagcctggttacgcagggctttcacctggtcgtggttgcgttgcacgccatggtactgacgttcaaccaggtcacgaatgcccagcaggttgtgcttgttgatcttctcgatcgcttccttgtaagccttcagtgcgtggtcttcaccgcgctcggcttcgttcagcaccgcctcttcatctttaccggtgagcatcgacttcacgtcgacccaaccacgatgcaaagcgccggcaacgctgccggaatcttccggatcaccacccagggcacgcacggcggtcttcagctcggcagcagcggtggcgcagtcggctgaacgcttggcgaacagggctttgagttctgggtgcttgatgtcttcagcgcactccttgaaacccttttggccgtcgatgctggtttcgatcaggtcgttcagtacggagatcgattctttattgatgtcagtcatttttcaattccttgtacgggttagaaggttgtcttagtggttgcagcgcccgtgccaggttttcaaaaaacaaattattcatatatttcagttatttacgattaattgaaccatctgtatgtacgttatttgcatgatctgtcatttggccttcatgcagaatgcctgtattttccaacgtcacgactcaaacacccgagcctgcatgaatcccgaaaaactcgaactgctgatcacccgcgaaatgcccttcggcaaatacaaaggacggatcatcgccgacctgcccggcccgtacctcaactggttcgcccgtgaaggtttcccccacggcgaactgggcggcttgctggcgttgatgcaggaaatcgacagtaacgggttatctgaattactcgaaccgctacgcgccaaacacggcaaacccgcaccgcgccattaagagccccccctatgccaaggaatgcagacaacgaacgtcattggcaggctgtttccgagcgctatgccctggaacccggcccgatcaatctggaaaacggttacttcggtcgcatgagccgaacggtgcaatcgcattacctggaacaggttgcgtttatcaaccgaagtaattcgctgcatgtgcgccaacgcttcgagcaaggcgagaacgtcgagattcgtcggcaactggccgagctgattgatgtggacccggagtcggtggcctttacccgtaacgccaccgaagccttgcaatcactgatccgcaactacaaccgcctgcaaccgggcgaccaggtgctgatcagtgacctggagtacgacaccgtcaagggtgcgatgcgttggctggccggcgttcgtggcgtggaggtgatcgaactgtcccacgcacacccggccagtttcgacagcctggtgcagacctatcttgatgcgtttgtgcagtacccacgtttaaagctgatggcgctgacccacgtcacccaccgcaccggcctggtgatgcccgtcgaagccgtcgccaaggcagcgcgcgagcatggcgtggacgtgatcctcgacggtgcccatgccctggggcagatcgagttcaacctggccgagctgggcattcagtttgccggcttcaacctgcacaaatggatcggcgcgcccctgaccctgggctttttgtacatcgccccggagcgcctggccgatatcgacccggacatgggtgagtttcactaccccaccaccgatgtgcgtgcgcgtacgtcctacagcacgccgaactttccggccttgatgaccttgccgctggtgtttgaagaacatcgcgccttgggcggctcggcggccaaaggtgcgcgggtcaattacctgcgggacctgtgggtgagccaggtgcggccgttggcgggaatcgaggtactgacgtcggatgatccacggctgtattgcgggatcacggcgttcaagtttgtagggcgggatcagcaggtgatgacagagcgattgctcaaggattacaacctgttcaccactactcgggtgggcgcggcgtttggtacttgcattcgggtgacgccggggttggtcacttcggcggcggatatcaatgtcttggtaaacgccatcaccgaactaaacaccgattaaaactgtgggagctggcttgcctgcgatagcggtgggccagcgaatgcatgtgtgactgatacaccgccatcgcaggcaagccagctcccacatttagagtggcgttggtcttaaggttttcttcaggcaaaaaaaagcggtacaccgaccaagtgcaccgccaaaaatgccgttaagcacagcaacaacgattcgataaatcagtccagcagcgccagtgcctgcgcggtgacttcctggatacgggcccagtcgccgttcttgacccactccgggtcgagcatccagctaccgcccacgcacatcacgtttttcaacgccatgtagtttttgatgttggccgggccaacgcctccggtcgggcagaatttcacttcgccgaacggaccgcccagggccttgatcgccgccacgccgccgctgacttccgccgggaacagcttgaagcgacgataacccagaccgtagccctccatgatgccggaggcattgctgatgcccggcagcagcgggatcgggctgtgtaccgaggcttccagcaggtcacgggtaatgcctggagtgacgatgaattgcgagcccgccacttcggccgcttcgagcatgtgacggtcgagtacggtgccggcccccgtgcacagttcagggcgttgttcgcgcagtacctgaatggccttgaggccgaactccgaacgcagggtcacttccagtgcggtcaaaccaccggctgccagggcatcggccagcggcagaatgtcctgttcgcgggcgatggtgatcaccggcaggatccgcgccttggcgcagaggctgtcgatcaaggcaactttgtccgccatggacacggtcggttgagggcttttcatagcggctgatccttggctcatgggcaccagtaaatctctaatgtaggttgcagaaacgcgcgaatcggcatggcagcgacgtcatcactggccagcgcggcgctcaaggtggtcaatttcgaactgccggaaatcgacagcacggtgtagttcgccgtggccagcaacgcgcgactcatggtcaggcgctggtgcggcacggtcggcgccagcatcggccagcaacgacgggtaccgtcgggctgcaaggcctggctcaggttcgggctgtcgggaaacagcgatgcggtgtggccgtcatcgcccatgcccagcaccagcacatcgatggctggcaattcggccagcaggcgatcggcctgctcggcagcgtcttcgaggttggcggcagcgctgtacaggctcaagaacctggccttggccgccgggccttgcagcaggtgctgcttcaacaggccggcattgctgtcggcatgttcgaccggcacccagcgctcgtcggccagggtgatggtgaccttggaccagtccaggccctgcttggccaggtgctggaaaaacgccacggggctgcggccaccggacaccaccagggtcgcttcgccacgggcactgatggccgtgcgcagttgctcggccacgtcattggccaggccttccgccaacagcaccggggtacggtactcatgaggggttacaccctggggcagtttcaaatcagatatcgccataccacgacctcccgtcccgcgtgatcagtgcaatcgagctcatcggcccccaggacccggccgcgtacggcttgggcgcatcaccggatttcttccacccggcgatcaactggtcacaccacttccacgcggcttcgatttcatctttgcgaacaaacaggttctgattgccgcgcatcacttccagcaacaaccgctcgtaggcatccgggatccgggcgctgcggtaggtgtcggaaaaattcagttgcagcgggccgctgcgcagttgcatgcccttgtccaggccctgctccttggtcatcacacgcaaggaaataccttcgtccggttgcaggcggatgatcagcttgttgctgatctgcaggcgctgctcgggggcgaagatgtagtgggacggttccttgaagtggatgacgatctgcgacagcttctgcggcatgcgcttgccggtgcgcaggtagaacggcaccccggcccaacgccagttgcggatatcggcacgcagggcgacgaaggtctcggtgtcgctctgggtgttggagttttcttcttccaggtaacccggcaccggcttgccggcgctgtagccggcgatgtactggccgcgtaccacctgagtggtcaggccgtccgggctgatgggcgccagggccttgagcaccttgaccttctcgtcgcggatgctgtcggcggacaggtcggccggcgggtccatggcgatcaggcaaagcagttgcagcaggtggttctggatcatgtcccgcagctggccggccttgtcgaagtaaccccaacggccttcgataccgacctgctcggccacggtgatttccacgtgggaaatgtagttctggttccactgggtttcgaacaggctgttggcgaaacgcagcgcgatcaggttctggacggtttctttgcccaggtagtggtcgatgcggtacgtgcggttctccgggaagaactgcgccacggcgtcgttgaccttgcgcgaggattccaggtccgaaccaatcggtttctccagcaccacgcgggtgttgtccgccaggccgaccttggacaggttctcgcagatggcgccgtacaccgccgccggggtggcgaagtaggcgatcaggcgctgctcggtaccggcgatgtccgccagggccacgtagtcatcagccttcaggaagtcgacgtgcacataggtcaggcgcgccaggaagcgctgggcgatggtttcgtccagttccttgccgacgaactctcgcaatgcgtgctcgatgtgcgccaagtgctgttgttcggtgccggcttcgcgggccagggccagaatgcgcgtgtcgtcgtgcagcaggccggcgccatcgagttgatagagggcaggaaataacttgcgcagcgccagatcacccaaggcgccaaacagggcaaaggtgcagggttctacggttatcgaaggcatgatgtttgttcttttatcaagttaagctacaaataccttttttcaaggcatcactcaaggaaaaatgtagtaataaccacaacattttcccgaaatacgcattccgagtggtggtgttcagctaccctcagtaggataggccaccgcaaaaggccactcgtcgattggttgccaccctaatttgcatcgtcgcccgaaggaaagactgaatggaccgcgtgcgaaatcttctggaacagatccggaaccgcctcgaagaattgaacaaggccgagaaaaaagtcgccgaggtcatcctgctcaacccgcagcaggcgacccgcttctccatcgccgcccttgcccaggccgcctcggtcagtgaaccgacggtcaaccgtttctgccgttcgttcggcgtgagcggttaccctgaactgaaattgcagctggcgcaaagcctggccagcggcgcagcgtatgtcagccgcgcggtggaggccgatgataaccccgaggcctacacccagaagatttttggcagcgccatcgcgtcgctcgacagcgcctgccaggccctggacccggccctgatcagcaaggccgtggacctgttgatccaggcgcggcagatccacttcttcggcctgggtgcttcggccccggtggcgatggatgcgctgcacaagttcttccgcttcaacctggccgttaccgcccatgccgacgtgctgatgcagcgcatgatcgcctcggtggcgcacactggcgagttgttcgtgatcatttcctacaccgggcgtacccgtgagttggtggaagtggcgcgcatcgcccgtggaaacggcgcttcagtgctgggcgtgaccgccgagaactcgccgctggccaaggccagcacggtgagcctgaacattccactgcccgaagacaccgacatctatatgccgatgacctcgcggatcatccaactgacggtgctggatgtactggccaccggcatgaccttgcgtcgcggggtggatttccagccgcatttgcgcaagatcaaagagagcttgaatgacagccggtacccggttggggatgagttcaactaagccggcctttgtgttggctgtactggcctcatcgggggcaagccccctcccacactttgatctgtgaatacattcaaaatgtgggagggggcttgcccccgataaggccagcagccacactgctatacccctgctcgagcctgcaaactcaaatgcgccctctcccccggcgccaggctcgccccggccatcgccgactccacgcacacaaaccccgacgcctcgttgaagctcacgcccaacagcggccggctgcccgggtgccacaccaccgtgtcggcgctgtcgccggtgtcgatgcacagttcgcgctgccaggcgtggtccttgagctgcaattcgccctcgtgctggaacacccgctggcaaccgccctccacccgcaattcaccttcctgctggcagacctgacgattgagctggtcgtaaccttgcgcaccgtcaagcccagacagcgctatctcatcaacatgaccaatacgccaataagcgtgcaatgcatggctcagctggcacggcaactcatcctgatgctcggtgctcaggcgcagctccagggtttcgcccaggtgcgcatgcaggtcgacctgccagtcgcacagctgcaattgccagtgcaggcgcacaccgtcgtcgtcggtgctgctgtcgagcaatttccagtcgatcaagcgcgcccagccatgggacggccaggcattttcactcgggtggcggccataccacggccagcacaccggcacgcctccacggatggcaccgacttgcggccacttggcggcacaccacaaccagggtttctggccggtcggctgaaagtgcagcaattgcgcgccttggcgactgaacaccgcctggcacagcggatgatcgatcaccaacacgtcacgcatctggaaacgctcccaggcgaacaccgggcgctcgcgcaaggatttgaaaaagcgttgcagcggttgctcatgcatgtgccacagtcctgaaaatcatcacaatgcagcccaaaaaaaagcggatagccatggctacccgcaaaatgcgcacagagagaaggagcttatcgcaacagcgttagaacgtagactgaattttcaggccagccaccaacgcgttgtcgactttgtccacgccgccaggctggacgacgtattgcaggttaggacgcacggtcagccagttggtgacgtggaagccgtagttgatttcgaagttgtactcggtttcgcggattggcgtgtaaagcgcattgtcgtagtcgttcacgccattggcgacgttgagcagttcggcgtttttcttcacgtcgttgttgacgtgcagacgcgcggcaccaatacccacgtcgtcttttggacgcgcatcgaatgggcctttgtacaccagcatcaacgactgatagttgtcgaccaggttggtttctttgtcgtggaaggtggcgttggccgcgatgttcagaccgcgggaagcgtcgccgttgtgcgtggtgagctgctgttgggcaacgaaccagtagcctttcttgctgctgtgggtacggtaggcggcgccagtggtcgctgcatcgttgccgttgatgtcttcacggacgtcagaggcatcagccgcgctcttgtagtaacccacacggtattcgcccggcaggttgttgaccttaggcgaccagaccaattccaccgggatcacggtgcccttggtgccgctgccgctgagcttgaagccgttgccgtgctccagctgcgacgggttctggttgtacgcaccgatctgcgcatacagctcaggcgtgatgttgtacttcacgcggatcgcggcctggctgaccggccagttgtaccaggtgttgacatagttacccacttgcgagccgcagaacgacaggttctggaagtcgcacgggaaggtgttgaagtcttcgccttcgccgaagtagccgagtttcacgtccaacttgttgtcgaacatctggtgctggatccagaactgggtcagacgcaccatgtggccacggccgtagacttccatcgaagagctcagcgtgccggcacgcgggtcgccaatgcggtcgttggagatgttctggccattacggttggtcaactggatcttggcctgggtattgtcccagccccacagtttttgcaggtcaagtgccacgccgagaccgaactggtcagagtaacgaccggttttgtcgtggttgtagccgcccttggcgttgtagcccatctccccaacgtagtcagccttgatgtcgataccttgctcgatcagcttggtacgctcaccgccccaatcgccggtcatccacttggaatcagcgctgaatgcatcggccgccatcgcattggcggacagtaccagggctgctgcagctgacatttggcagatcagccgagtgttgttgtgttgctttttcatccctacatcctcgtctttattgttattaaactgtttttatctaacgcggtttactttttttatctaaaacaacaacttatctgcttcagcggcctttgaattgggccacgttgtcggcatgcccctgtgtgggcgatgaagaaacagtgcccagtcgctcgcccgtgttggcgtcgaacagcagtaccttggaaggatcgaattgcagggtcagggtctcgcccacctgcggtgccacgtcgggtgccaggcggcagcagaccttggtgtcattgagttgcacgaacaccagggtgtccgggccggttggctcggtcacctggacttcggcacgaatgctcgacgcactgttgccctcgcccgccgccaacatgatctgctccggacgcaggcccaggatcacgtcgcgatcttccaggccggcatccgtggtgttcagggccagctcacaacgcgcctggccgctgtcgagcaatgccaccaggcggccgtccttgcgctgcagacgcagcggcacgaagttcatcggcggcgaaccgataaagctcgccacgaactggttggccggattgttgtagatctctttcggcgtgccgaactgctggatgatgccgtccttcatcaccgcgaccttgtcgcccagggtcatcgcttcgatctggtcgtgggtcacgtagaccgtggtggtcttgagacgctggtgcatcagtttcatttcggtacgcatttcgacacgcagcttggcgtcgaggttggacagcggttcgtcgaacaggtagatcttcggccgacgcgccagggcacggcccatggccacgcgctgttgctggccgccggagagctggccaggcttgcgattgagcaggtgttcgatctgcagcagcttggccacccgcgccacttcggcgtcgatatcggcctggggcatcttgcggatcttgaggccgaactcgatgttctcgcgcacgctcatggtcgggtacagcgcgtaggactggaacaccatggcgatgtcacggtccttggggctcatgccgctcacgtcctggtcgccgatcatgatcgcgccgccggtgatggtctcaaggccggcgatgcagttcatcagcgtggatttgccgcatcccgaaggaccgaccaggatcaggaattcgccttccttgatcgacagttcgatgttcttcaaggtgtcgggcaggccggcgccataggtcttgtttacattgcgaagttcaagcgtagccatgattaccccttgaccgcgccggccgtgaggccgcgcacgaaatacttgcctgcgatcacatagaccagcagggtcggcagcccggcgatcatcgccgccgccatatccacgttatattccttggccccggtgctggtgttgaccaggttgttcagcgccaccgtgatgggctgggagtcgccgctggagaacactacgccgaacaggaagtcgttccagatctgggtgaactgccagatcaggcagaccatgatgatcggggtcgacatcggcagaatgatctgacggaagatggtgaagaagcccgcaccgtccagacgcgcggccttgatcagcgcatccgggatgctcacgtagtagttacggaagaacaacgtggtgaacgccagcccgtagaccacatgcacaaacaccaggccggtggtggtgctggccaggcccatcttgccgagggtgaacgacgccggcagcagcacggtctggaacggcaggaagcagccgaacaacaacaggccgaagaacagctgcgaccccttgaagcgccagaacgacagcacatagccgttcaatgcaccgatggcggtagagatcagtacggccggaacggtgatcttgatcgagttccagaagtagccgtccacagtcgcccaggccttgacccagccgatgccggtgaccacggtcggccagctcagcaggttgccggagctgatgtcttccggggtcttgaagctggtcagcagcatcaccaccagcggcaccaggtacagcagcacggcgaggatcagcaccgcgtagatcgcgatgcgactcaggctgatggcaggtttggaggcgagactagtcatgacgtttggtcctcagctcggagtagaggtaaggcacgatgatcgcgaggatcgcaccgagcatcaggatggcactggccgaacccatgcccatctggccacggctgaaggtgaacgagtacatgaacatcgccggcaggtcggacgagtagccggggccgccagcagtcatcgcggctaccaggtcgaagctcttgatcgcaatgtgcgccaggatcatcaccgcactgaagaacaccggacgcaggctgggcagcaccacgctccagtagatgcgcggcaggctcgcgccgtcgatctgtgcggcgcgcacgatcgattgatcgacgccacgcaggccggcgagaaacatcgccatgataaagcccgaggcttgccacacagcggcgatcaccaggcagtagaccacgcggtccgggtcgatcagccagtcgagacggaagccttcccagccccagtcacgcaggagtttgtccaggcccatgcccgggttgagcagccatttccaggcggtaccggtgacgatcatcgagagcgccatcgggtacaggtaaatggtgcggataaagccttcgcgacggattttctggtcgaggaagatcgccagggtcacgccgatgaccagggtgatgccgatgaacatcccgccaaacaccgccaggttcttgctcgctacccaccagcggtcgttgtcgaacaaccgcgcgtattgcgcaaggcccgcccatttgtagcttggcaggaacgtggaattggtgaacgagagtacaaacgtccacaggatgtagccgtagaagcccaccaacacgatgaacatgctgggcgccagcaccagtttgggtagccagcgctgcagtgcatcgaacggcgaggctttgctgaacacagcaacagaactcatggggaaatccagtacagggaaaaaggactacaggaacaagccttgcggggggccagggagtccccccacaaggtcaaccgttacttggcggacttgatcgcagcgccaagtttcttggcggtgtcggccgggtcggctttcgggtcgttgatgtagttggtcacgacgtcaaagaacgcaccttgcaccgccagggtcgtggccatgttgtgcgccatgcttggctgcaggccgccggtcttggcgtctgccaggaagtccttggcagcggtctgggcgcaggagtcgaagccgtacgagtccattttgttcagcatgtcgttacgcacagggatcgaacccttgttgatgctgaacactttctggaagttttcacccagcacgactctggcaatgtcctgctgaccggcagcagtgcctttgtctttctgcttgaacaccgccagggagtcgatgttgtaggtgaaggctttgtcggtgcccgggaaggctacgcactcgtagtccttgccggcgactttcttggcggcggtccattcggacttggcccagtcacccatgatctgcatgccggccttgccgttgatgaccttgcctgcttcgaggttccagtcctggcctttgccgtcgacgtccatgtaggtcgcgactttcttcagctcggtcaaggccttgaccatttccggaccggtcagtgcggcgttatccaggtcgaccagggctttcttgtagccatcggcacccatcaccgagagcaccaccgcttcgaacacggtgctgtcctgccaaggctggccaccgtgggcaagcgggatgaagccggctttcttcagcttgtcgccggcggcgtagaattcttcgagggtggtcgggttcttggtgataccggctttcttgaagacttccggattgatccacagccagttcacgcggtggatgttgaccggtacggcgacgtagtcaccttcgtacttcacggtatcggagactttcttgtcgagcagggagtcccacttttcttctttggcgacgtccttgagcacgtcggtgtcgagcaggccagtggacgcccattcctggatgtcggggcctttgatctgggcaacacctggcgggttgccggcgactgcacggcttttcagcacagtcatggccgtggcgccaccgccacctgcgacggcaccgtctttccaggtgaagccgtctttctcaacttgggccttcaggacatctacagccgccttctcaccacccgaggtccaccaatgcacaacttcaaccgtccctttcgagtcggcggcaaatgcactgaggggaaacaacgaggcaatggaaatagcgacggcgaggcgattaatcgcgttcatctgagtaccttttcttgttgttatgcatgcaagtcttaggcttgcgctgcacggagtttaaacagggttttttgaggcgcaggtaacaaagggatgcacaaatgtcaccagttggtgacatagcgcccagccccgatggcactggccatgctgggtgccaagggcagtgcgggcagcacgaccgcttgccaggcatggtacaggtccggcttgccgccccatattttgctgctgggttggttgtgcgggctgagttcgtggtgccagctgccgtggatgcggtcgataaagtgggtttcgcagaactcccagaaacgccggtaccaggtttcgtaatgcaattcgccggtgcgtttgagcaaggcctgggcagcggcgctggcttcggcgtgggtccagtgcaggcgctcgcgcaccaccgggcggtggttccagtccagggtgtagacgatgccgggggcgccatccaccgcccaggcgtaatcgcaggcactggcaaacaggcctttggcatcggtcaccagccattcgggtgtggcgagcccggcttgcaagcgcgcggcctcaaggtgcagcaccagccgcgcccattcgaagccatggccgggggtgatgccgtaggggcggaagccatcggcggggttgtcttcgttgtagccgagcaagggctgccaggtggtgtcgaaatgctcgatgaccatgtactggttgccggcggcatgggtgtggatcacacgttcgacgatgcgcagggcgcggtccagccagcgtgtatcgccggtcacatcggccagggccaggaacgcctcggtagcatgcatgttgctgttggcgccgcggtaggcttcgacgccgctccagtcctgggcaaaggactcaagcatcacgccctcctcctcgctccagaagaactggtcgatgatatggatggcgtcgttcagcaggttttgcgcgccgggagcaccggccaccaccgccgagctggcggccagggcgacaaaggcgtgcaggtaggcggccttgccacggttgccgtcgacggcatggggcgtggcgaaccagccaccgtgctcactgtcgcgcaacgggccgttgagggaggcaaccccgtgctcaatcagttcggcgtaaccgggcaaccccatggcgtgggccatggcgaagctgtggatcatgcgggcggtgttcatggtttcggcgcgggcatcggccggcaaccggcctttgtcgtccaggttgccaaagccgtcgggcagtcgagacgccttggcaaacgccagcaggcgctggccttcggcagcgagccagacgtgatgggcaggcgcgttcagccaactgctggcaggcagtggttgggtggtcatggggggcccttattattgtttgtgggatcaccggagtctaaacaagggcgcggtgggggcaagtaacgaaggggatgggaaatgtcaccgagtggtgacatttccatcagagactttattgcccgagcggggtgactctcgccggcgcgttgagctgttggttgagggtctgcacctggctctgcaaggtggtgatattgcgcgtggtctggatgcggaacacgtcgaactccttgttggtaggcccatcactgctggccgacgcgttgtcctgggcgctcttgagcaccacgaggtcctgttcgatacgggcgatggcggcgctggggttgccctgtttcttcaatgcggccacgtcggcggtcagttccttgatctcgttatcgcgcttggccgcgtcaccttgtgccgccttgagcgttgccacggcgtcggtcaacgcctggacctggccttgcagcttgctgttggcattggacaggtcagtggtgctggcggtcatttgcgccaggcgcttgtccagctcggtggcctggccggccacaccgacttgctgcttgccctgctccagcagctggctttcaagctgcttgatctgcagtttcagcgcttcgctgccgttgttgacgctggcctcgctggccaccaccttgccggaaatatcctgcaggcgccccgccgcttcttcgctgatgcgcgcaaagctctcctgggtggccaccaactgctggcccatcagggagatctgctggaagctccaccaggccaggcccgcaaaggcgatcagcagcgcaccgatcaaggcccacaacgggccggtgctggcgctcttgaccttgaccaccttggggttgcgcgaacgcaccgaggtggccggggtaggctcgaaatcatcgtcatccccgacatcggcccgcaggctgggaacgttgtcgaagtcgtctttagcatcgttacgcatgaatcaaccctgaatcggtgaggtggcgagcgacgggagtataaaccgcgttcccggcgctctgatcgacccggaacgccgaattcggttcccgaagtgttgcctgttgtgtgcttacttcaacccagggtcctgggccttccaccaactgcagaactcgtcgagggcggtccacaggctgacctttggctcgtaatccagataatgcctggcgcggctgatgtcgagggtgaaatctttgttcatcacttgcatgcccaggcgcgacaacgccggctccggacggcccggccacatcgcacaaaacgcttcgttgagcgccgccacgctgtaggacaaaccgtaggaccgataccgcgtcacctgcggtagctccatctggcgcatcacgtagttcaccacatcccacaccggcactggggtaccgttgctgatgttgtaggccttgcccagcgccgagcccgtggcgagcaggctgctgagcagcgcttcgttgaggttgtgcacactggtgaaatcgaccttgttgaggccgtcgccgacgatggccagacgattcttgcgctgcattttcagcaagcgcgggaagatactcatgtcaccggcgcccgtgacgaagcgcgggcgcagggccaggacttcgaggccgaactcctgggcaccgaacaccttctgctcggctaggtacttggtagcggcataggggtgtttgaagcgtttgggcacttgctcttcggtcaggcccagatgatcgcgcccatcaaaataaatcgacggcgacgacaggtgcaccagccggccgacacgctccttgaggcaggcttcgacgacattttcggtgaccagcacattgccctgatgaaagtcctgatacttgccccacaacccgacagcgccggcgcaatgcaccacggcttcgacatcgcggcagaggtcgcgcaccaggtcggcgtcattcaaatcaccctggataaactcggcgccgcgcctgaccaggtgctccacaccttcggcacgtcgcccgttgacccgcacgtccaggccctgctccagggcgaaacgcgcaaagcgcccgccgatgaagccgcttgcgccggtgaccagaatcttcatgtattaccccatgttctttcgtttttcatcgctgttgccttgacgcgcgtcatcactccaacggcaccaaccattggccacacgcctgggccagatgatcggtcaacaagcccagcagttgcccgccactgcgccaatgatgccagtacaacggcacatcgatgggcttatctggcaataactcgaccaagaggcccttttccagttggtcgcgtacctgcaattccggcaccaacccccagcccaggcccgcttccgtgaggcggataaagccttcggacgatgggcataaatggtgttcgaaaccgccatccacaccgagggatgccaggtagcggtgttgcaggaaatcatccggaccgaacaccaaggccggtgtgcgtgccagttggtcggcgcgcacgccgtcgggaaaatgccgggcaataaaggctgggctcgccaatgcccgataacgcatggcccccagcaacaggctacgcgccccggccaccgggcgctcgctggcgcagatgcaggccgccacctcaccggcacgcatgcgcttgagacctacagtctggtcctccaccaccagatccagcagcagatgctgctcggcgcaaaaaccactgacggcctcggcccaccaggtggcgaggctgtcggcgttcaacgcgatgcgcaggcgttcgggcatgccttcctcatccagggccggcacgtggctttgcaggtcgcgctccagcaagcgcacctgttgcacatggttgagcaggcgacggccaatatcggtgggcgtcggcggcgtggcccgcaccagtaccggctggccgatgcgcgcctccagcagcttgatgcgctgggagatcgccgactgcgacagccccagcacctgggcggcgcgctcgaagcccgcctgttccaccaccgccgccagggcggaaagcaatttatagtcgaacatcagtttctctaatgagcgatcagcaatattggtttttcttatacagcctgcgccctgagaatagccagcatcgcttctctctttacaaggaacctcccatggctggcgaaaccgccctggcaaccctgctgcgcagcatgagcccccatctgaatgacggcgactatgtgttctgcaccctgcccgatcagcgtatccccgccggttgcgaggtaatcggcagcttccgcgaacaggagggcctgaccctgatcgtcgaacgccaacaggcggaacgggctggcctggcctttgattacgtcgccgcgtggatcaccttgaacgtgcattcagccctggaagccgtgggcctgaccgccgccttcgccagcgcgctgggccaggccggcatcagttgcaacgtgattgccggctattaccacgaccacctgttcgtcggccgtgccgatgcccagcgtgccatgcacgtgttgcagcaactggcggcaaacgcggagtagaccctatgtggcagagctatctgaatggtttgctggtcgccctcggcctgatcatggccatcggcacccaaaatgcatttgtgttggcgcaaagcctgcgccgcgaacatcacttgccagtagccgcgctatgcgtggtgtgtgatgccctgctggtggccgccggggtgttcggcctggcgacggtactggcgcagagcccgatactgctggcggtcgcacgctggggcggcgcggctttcctgatctggtacggcgcctgcgcactgcgccgggcctgttcgaaacagagtctggatcagggcggcaacctgcaggtccgctcgctgcgcgcggtgatgctgagcgcactggccgtgaccctgctcaacccgcacgtgtacctggacaccgtgttgctgatcggctcactcggcgcccaacagaccgagcccggcgcctacgtggccggtgccgccagcgcatcgttcctgtggttcgccaccctggcgctcggcgcggcgtggctggcgccctggctggcacgcccggccacctggcgcctgctggacctgttggtggcggtgatgatgttcagcgtggcctatcaattgatcagtgcctgaggaatattccaaaacgctctggaacctctatcccacacagttgttgcgtggttttgccgcacccccggtgctatgatccggaccctgcgccgcaaagagtacaaactccccggcgcttgtttggccgcccgtgatcggccttgcgctcaccgcaactgacctgattaggagatttatcatggctttcgaattgccgccgctgccctacgcacacgatgccctgcagccgcacatctccaaggaaaccttggaataccaccacgacaagcaccacaacacctatgtcgtgaacctgaacaacctggtgccaggcaccgagttcgaaggcaagaccctggaagagatcgtcaagtcctcttcgggcggcatcttcaacaacgctgcccaggtctggaaccacaccttctactggaactgcctggcgccaaacgccggcggccaacctaccggcgcgctggctgaagccatcaacgctgcgttcggttcgttcgacaagttcaaggaagagttcaccaagacgtccgtcggcaccttcggttccggttggggctggctggttaaaaaggctgacggttccctggccctggccagcaccatcggcgccggcaacccgctgaccagcggcgataccccgctgctgacctgcgacgtgtgggaacacgcctactacatcgactaccgcaacgtgcgtccaaagtatgtggaagcgttctggaacctggtcaactggaagttcgtggctgagcagttcgaaggcaagaccttcactgcctaagcactgcttgcagtaaaaaaagcccggcaaatgccgggcttttttgtggttgaaatcaatgctggatagttggaactcactgacatgaatcggccacccagcacgtgagagaaataactctctcagttcatgcaggagagtacgcaatggatccgttatcgatagcgtcagctattacagggattgtgccgctgacaactaaaatcgccgatgtagtaggtaaaggtctggacttggcgggaaaaggcgttgacttatttagcaaggtgctggatttgaatagcaaagacgggaatgagccagcgagcaaaatctgcaacgacgttcatcagaagaatacggctcagattacttttaattcctaaaacatccttcaaccccgcgcgggatccgaaaatgcgttcgctttcgctttcgctcccgcccccttcactcgacagtgtccagattccttcaagccccaatgttcctttgactgccatgcccagattgccaatactcatggcatattgaaggccacccgcatgagacaaggaatgcccctttgaagctggaactcaaaaacagcttgtcggtgaagttgctacgggttgtgctgctgtcggcattgatcgtgggcgtcgcgctaagcgtggcgcagatcgtttttgatgcctacaagacgcgccaggccgtagccggcgatgcccaacgcatcctcgacatgtttcgcgacccctccacccaggccgtctacagcctggaccgcgagatgggcatgcaagtcattgagggcctgtttcaggatgacgccgtgcgcatggcgtccatcggccaccccaacgaaaccatgctggcggaaaaaagccgtgccttgcagcaagcgcccagccgctggttgaccgatctgatccttggccaggaacgcaccttcaccacggcgctggtgggcaaaggcccctacagcgaatattacggcgacctgagcatcaccctcgacaccgcgacttatggccagggctttatcgtcaactcggtgatcatctttatttccggggtgctacgtgccctggccatgggcctggtgctgtacctggtctatcactggctgctgaccaagccgctgtcacggattatcgagcacctgacgtcgatcaaccctgaccgccccagcgagcacaagatcccgcagctcaagggccacgagcgcaacgagttgggtctgtggatcaacaccgccaaccagttgctcgaatccatcgaacgtaacacccacctgcgccacgaagcggaaagcagcctgctgcgcatggcccagtacgacttcctcaccggcctgccgaaccgccagaaactgcaggaacaactggacaagatcctcatcgacgccggccgtcggcaacggcgcgtagcggtgttgtgcgtggggctggatgacttcaagagcgtcaacgagcagtttacctaccaggccggcgacaaactgctgctggccctggccgaccgcctgcgcgcccacagcggtcgcctcggcgcactcgcccgactgggcggcgaccagttcgccctggtgcaggccgatatcgaccagccttacgaggccgccgagctggcacaaagcatcctggacgacctggaggcagagttcgccctcgaccacgaaggcatccgcctacgcgccaccatcggcatcaccctgttcccggaagacggcgacagcaccgaaaagctgctgcaaaaagccgaacagaccatgaccctggccaagacccgttcgcgcaaccgctatcagttctacatcgccagcgtcgacagcgaaatgcgccggcgccgcgagctggaaaaagacctgcgcgacgccctcagccgcgaccagttccacctggtgtaccaaccgcagatcagctatcgcgatcaccgcgtggtcggtgtggaagcgctgatccgctggcagcatcccgagcatggcctggtaccgccggacctgtttatcccgctggccgagcagaacggcacgattattccgattggcgagtgggtgctggaccaggcctgccggcaattgcgcgaatggcacgacctgggcttcaccgacctgcgcatggcggtcaacttgtccaccgtgcaactgcaccacaccgagttgccacgggtggtcaataacctgatgcagatctaccgcctgccaccgcgcagcctggaactggaagtcaccgaaaccggcctgatggaagacatcagcaccgcagcccagcatctgctgagcctgcgccgttccggggcgttgattgccatcgatgactttggcaccggttactcatccctcagttacctgaaaagcctgcccctggacaagatcaagatcgacaagagctttgtccaggacctgctggatgacgacgacgatgccaccatcgtgcgggccatcatccagttgggcaaaagcctgggcatgcaggtgatcgccgaaggcgtggaaaccgctgagcaagaggcctacatcatctccgagggctgccatgagggtcagggttaccactacagcaaacccttgcaggcccgggagttggcggcatttctgaagcagtcggagcgtaacaacgcggtaattctttgaccggccaaaacgatactgaatatttcccgcgtataaccctttacacaaaatgcaaatctttcgcattatgtcgcagttttttgcgctccccccgcgcgccccatcaacaaccgaagcaggatgttcgccatgattcgtatgcccctggccaccgccagtctgctggccattgccatttctctcgccggctgtggcgaaggtaaagacaaggccgcagcgccacaggcgccgaccccggctgccagcactaccgctccagcggctgccacccctgccggccaggtcgacgaagcggctgccaaggccgtggtcgcgcactacgcagacatggtgttcgcggtctacagcgatgccgagtccactgcaaaaaacctgcagaccgcgatcgacgcgttcctcgccaagccgaacgacgaaaccctgaaagccgcacgtaccgcctggatcgccgcccgcgtcccgtacctgcaaagcgaagtgttccgcttcggcaacaccatcatcgacgactgggaaggccaggtgaacgcatggccgctggacgaaggcctgatcgactacgtcgacaagtcctacgagcatgccctgggtaacccgggcgccaccgccaacatcatcgccaacacccagatccaggtcggcgaagacaaggtcgatgtgaaggacatcactccggaaaaactcgccagcctcaatgagctgggcggttccgaagccaacgtcgccaccggctaccacgccatcgaattcctgctgtggggccaggacctgaacggcaccggcccaggcgccggcaaccgtcctgcgtcggactacctgacgggcgacggtgccaccggtggccacaacgagcgccgccgtacttacctgcgtgccgtgacccaactgctggtcagcgacctggaagaaatggtcggcaactggaaacccaacgtcgaagacaactaccgcgccaccctggaggcagaacctgccaccgatggcctgcgcaaaatgctgttcggcatgggcagcctgtccctgggcgagctggccggtgagcgcatgaaggtttccctggaagccaactcgccggaagacgaacaggactgcttcagcgacaacacccacaactcccacttctacgacgccaagggcatccgcaacgtctacctgggcgagtacacccgcgtcgacggcaccaaaatgaccggcgccagcctgtcgtccctggtggccaaggccgacccggctgccgacaccgccttgaaagcggacctggcggcgaccgaagcgaagatccaggtcatggtcgaccacgccaacaagggtgagcactacgaccagttgatcgcggccggcaacgatgcgggcaaccagatcgtgcgcgacgctatcgccgcactggtcaagcagaccggttcgatcgaagcggcagcgggcaagctgggcatcagcgacctgaacccggataacgctgatcacgagttctgatccaggtgggagggggcttgctcccgatagcagtgtgtcagtgaagcacgtgtttactgacacatcgccatcgggggcaagccccctcccacatttgactgcattgcctcaaccccggtttacatgccccgcaccccaggtagaatggcgcctctgccctatctcgagtgaatttcatggcgttgccgaccctgcgcatcatcggtttcatcatcggcatcttcctgatcactctcgcgatcgccatggtcgtgcccatggccaccctggtgatcttcgaacgcaccagcgacctgccctcgttcctgtgggccagcatgatcacctttctcgccggcctggccctggtgatccccggtcgcccggagcatgtgcacctgcgtccacgggacatgtacctgctgaccgtcaccagttgggtggtggtgtgtgtcttcgccgcgctgccctttctgctgacccagcacatcagctacaccgactccttcttcgaaagcatgtccggcatcaccgccaccggttccacggtgttgagcggcctggacaccctgtcgccgggcatcctgatgtggcgctcgctgctgcactggctcgggggtattggttttatcggcatggcggtagcgatcctgccgctgctgcgcatcggtggtatgcgcctgttccagaccgaatcttcggaccgctcggaaaaagtcatgccccgctcgcacatggtggcgcggctgatcgtggccgcctacgtgggcatcaccatccttggcagcctggcgttctggtgggccggcatgggcctgttcgacgcgatcaaccacgcgatgtcggcgatttccaccggcgggttctccacctcggatgaatccctggcgcactggaaacaaccggcggtgcactgggtagcggtggtggtgatgattctcggcagcctgccgttcaccctctacgtggccacgttgcgcggcaaccgcaaggcactgatcaaggatcagcaggtacaaggtttgctcggtttgctgatcgtgacctggctggtgctcggcacctggtactggtggaccaccaacctgcattggctcgatgccctgcgccatgtggcgctgaacgtgacctcggtggtcaccaccaccggtttcgcgttgggggactacagcctgtggggcaacttctcactgatgctgttcttctacctggggtttattggtggttgctcgggctcgacagccggcgggatcaagatcttccgtttccaggtcgcctacatcctgctcaaggccaacttgaaccagctgattcacccgcgcgcggtgatcaagcagaagtacaacggccaccgcctggatgaagagatcgtgcgttcgatcctgacgttttcgttcttcttcgccatcaccatctgcgccatcgccctggccttgtcgctgctgggcctggactggatgaccgccttgaccggcgccgccagtaccgtatccggtgtcggcccggggctgggggaaaccatcggcccggcaggtaacttcgccagcctgccggatgcggccaaatggatcctgtcattgggcatgctgctcggccgactggagatcattacggtctttgttctgtgtattccggccttttggcgtcactgacagccgaggtttccaacaaccgcgcccggtattcgccgggcgtggcatcgaaccagcgacgaaacgcacggaagaagttactcgggtcggcaaaccccagcaggtaggcgatttccagcaaggtcatgctcggctgcgccaggtattgctcggcgagttcgcgacgggtgtcgtcgagcagggtctggaagctggtgccctcctcctgtagccgccgctgcaaggtgcgttgtgacaggtgcaacgtctgcgccaccacttcacgcttgggctcgccctggggcaacagccggcacagcacttgccgcgccttgtgggtcacgcggctttccgagaaacgcgccaggtattcaccggcaaatcgatcatgcaacagcgccatggcctcgttggccgtgggcagcggcgcttccatgtcggcccgctcgaaaatcaacgcgtcgtagggtgcgttgaactccaggggtgcgtggaaggcttgtttgtagggtgccaggtccgccggctgatcaccttgcagcaccaccttgcgcggctgcagggtgcggccggtgagccagccacacagcgccagggcactggccaacgaggcttcggcgctttgccgggttggcggcaggtgatcgccatgcaccgtcagaatcagcgcatacccttcggggatcagtcggaaactcaggtcggcactttcagcgatgatgcgctggtaacgcaccaggcgcataaaaccctcggcgagggtgttgctggacatcagcgcatagcccgccacatgaaacgacgccgggcgcaccaccttgcccatgttcaggccaatcgccgggttgcccgacagctctaccgcgcgctgccataggcgggtcatgcaatcctgcgggaaccgcgcatcgggatcattcagggcggcgtagtccaggcccagttgcttgaacaaggcgcggcaatccaggccgtccatttccaatgccttgactatccccatcgcccagcttgcagaagttgttcgttcgctcatggcgtcttcttaataaagcaggctcaaacgacagccaggaagccaaggatactaaagtggcatctattgtcactggctgttactactgatcactctagactcaaataagctccccgccgaacatctgttgggcggcataaccaccaaagggccggccactgtggaaaacgtcaagcgattcaatagctttgctgagttctacccctattacctggccgagcacgccaacagtacctgccggcgcctgcatttcatcggtaccacgctggtgatcggcattctggcgtatgccatcggccggggttcgttgggcttgctgatcgccttgccgattgccggctacagctttgcctggatcggccacttcttcttcgaaaagaaccgcccggcgacctttcagcacccgttttatagcctgctgggagactttgtgatgtaccgcgacatgattctgggcaaggtgccgttctagccgaacgaccgtttaaacgatgaaagttcatccatccggcgacataaaaatctttttgtcatttgcggtgctgtatcctgccaaggctttttgagagcgcggaatcacctgcgattgaaaaaacagaccttgcgaggagcgacgacgatgcacgagatacctaatctccccttcccaagcctgcaccctacagagcagccaacaccgcagcaggccagcgacaaacagcctgaggccaaagaagccaaaccagtcgacagcaaaagccaggactgacgccgtaacagaccgtgtggaaagcgcaacgttgagcgctttccacactgcctgaatcaatcgagacgcccatcatgaccgataccctccccgacaccccggataccgccgtactcgacgctgccctgcagatggtcgaggtgtggaaccgcctcagcgcggagaaacaggccgtactgctcaagcgtttcggcacccaggaaaacgcgctggccgccctggtcaccacccaactgctggcccctgcgcgcgcctgacgtctttttgatccgaggtttttgtgttttagcgccctgcgcgaagcaaaccaccggtatcattagcagcctatctttacctgctgcgacagtggacctctcccatgcccgatatccagcgccccatggcggtcacgctgcaagttgtttccatcgtcttgttcaccttcatcggctacctgaatatcggtattcccctggccgtgttgccgggctatgtccacagtgaactgggctacggtgcggtgattgccggcctggtgatcagcgtgcaatacctggccaccctgctgagccgcccgtacgcgggcaagatcatcgacaacctgggcagcaaacgcgccgtgctgatcggcctggtcggctgtggcctgagcggcgtgttcatgctgctcgctgcgtggttctccagcctgccagccttgagcctgggcagcctgttgatcggccgcctggtgctgggcagcgcggaaagcctggtgggctcgggtgccatcggctggggcatcggccgggtcggcgcgcagaacaccgccaaggttatttcctggaacggcatcgccagctacggcgcgctggcggtcggtgctccattgggcgtcgtgttggtgaagagtttcgggctgtggagcatgggggtcagcatcatcctgctggccatcgtcggcctgctgttggcctggaacaaggtcgccgcaccgattgtggccggtgtacgcctgccgttcatgaatgtactgggccgggtcttgccccacggctgcgcgctggcactgggctcgattggatttggcaccatcgcgaccttcatcaccctgtactacaccacccagcactgggataacgcggtgtgggccttgagcttgttcggcgccagctttatcggcgcacggctgttgttcggcaacctgatcaaccggatcggcgggtttcgcgtggcgattgcctgcctgtcagtagaaatctttggtctgctgttgttgtggctcgcgccggatgccagtttggccctggccggtgcggcgttgagcgggtttggcttttccctggtgtttccggccttgggcgtggaagcggtcaacctggtgccggcgtccagccgaggctcggcggtgggcgcttactcgctgttcatcgacctgtcgctgggcatcaccggcccgctcgccggggccgtggcggcggggtttggctttgcgtcgatcttcctgttcgccgccctcgccgccttgggtggcttgctgctcagtgtttacctgtaccgacaagcgccgaaagcccgtgaggcacgcggcgactaaaagtcgaccttgccacgcccggccttgatgctgccgcgcttggtcttggattcgaggcgacgttttttcgagcccagggtcggcttggtcgggcggcgcttcttctccaccttggtagcgctgaggatcaactccaccaggcgctccagcgcatccgcgcggttctgctcctgggtccggtattgttgcgccttgagcaccagcacgccttcactggtgatgcgactgtcgcgcagcgccagcaaccgttccttgtagaagtccggcagcgacgatgcgggaatatcaaagcgcaggtgcaccgcactcgacaccttgttgacgttctgcccaccggcgccctgtgcgcgaatggccgtcagctcgatctcggcgtcgggcaggtggacgttggtggaaatcaccagcatgagcagcaggcacctctaaaggggggaagcccaaggatacgcgaatgcgccctccgccatccctccaagcaacaaacccggcacatggccgggtttgcttgatcacactttacgcttacttgaccgctggcactgccgcatccaaggctcgctgcgcactgcgtttgttcttgattgcgtaacacaccgccataaacgccacccacaccggaatcgcatacaccgacacctggatgcccggaatcatcagcatgatcaccaggatgaacaccacgaacgccaggcacacgaagttgccgtaggggtaccacaacgccttgaacagcggcacctggccagtgcggttcatgtgctggcggaacttgaagtgggagaagctgatcatcgcccagttgatcaccaacgtggccaccaccagggacatcagcagttccagcgcgtgctgcggaatcaggtagttcatcaacaccgccaccagggtgatcgccgccgaggcgaggatggaacgcaccggcacgccgcgcttgtcgatcttggccaatgccttgggcgcatcgccctgctcggccatgcccagcaacatgcggctgttgcagtaagtgccgctgttgtacaccgacagcgccgccgtcaggaccacaaagttgaggatatgcgcggcggtgttgctgcccagcattgagaacacctgcacgaacgggctgccactgtaggcgtcgccagaggcgttgagggtttcaagcaggctgtcccatggcgtcagcgacaacagcaccaccagggcaccgatgtagaaaatcaggatgcggtagatcacctggttgatcgccttcgggatcacggtgcgcggcttgtccgcctcagcagcagtgaaaccgagcatttccaggccgccgaaggagaacatgatgatcgccatggccatcaccaatccgccgacgccgtggggaaagaagccaccgtgttcccacaggttgctgaccgacgcctgcggcccgccgctgccgctgaccagcaaatagctgcccagggcgatcatgccgacgatggccaccaccttgatgatcgcgaaccagaactcggcctcaccgaacactttgacgttggccaggttgatcaggttgatcagcacgaagaacgccgcggccgaaacccaggtcggaatctccggccaccagtaatgcacgtatttgccgacggccgtcagctccgacatacccaccaggatgtacaaaatccagcagttccagcccgacaggaagccggcgaaaccgccccagtacttgtgggcaaagtggctgaaggaaccggcaaccggctcttcgacgatcatttcgccgagctggcgcatgatcatgaaggcaatgaagccgcagatggcataacccaggatcatcgacggcccggctgatttgagcaccccggccgagccgaggaacaggccggtgccgatggcgccaccgagggcgatcaactggatatgtcggtttttcaggccgcgtttcagctcgcctgaagaggaatggggtccactcatgaaaagggtctcacgcaaggtttgagaagattgattgcaggttgctgccttgaattaccgactcaagcagcgccgctcaaaccccagcgcaggcaccaggagtacagcgtctttctaacggtcatgcgtcacctgtttgtttttatctgtgacgaaatcgaacccgtccggctcgtggccaggcggagtgatcagggtgggtacaccctgaggtcttggcctttagcgtggttacgcaagggggtcacagtaaaacgcggcgcattgtacaccgctcgaccgcttggggccgcccgccaaaagcgtgtgcgacgatctgtcaggtaatccttacagcgcaagatcaaccaataatgtcgccatttacgcgtaaattaatcgttacagcatggaaaattcacgttacagccgtgatctgaataaaaaatgacggtcagaaatttcctgcaattcagcgctgccagttgtctgtttttcctcaagaaacaatcaaacaccaaaaacagaacaaaaaatccaaatgaaaccgtgtcaataaaaattttgcattttgaaacactctctcctaggttctttgcacttgcccgcgaagcccgttggcaagccgttctcaaacaccgtcctctaggagatacaccatgcaagcactggaaaacgacctggaaaccgaactgcaactcgacgactggtttgaagcgccgacccatgaggccgccgtagaaatgatgcaagccgacgctgttgtgccatttggcacagcgatgtggcccttctaaaaaccggcacgctcccggcaggtgccgtgcacggcacctgctcccttacccaaggcacagaaggacgcacgtcatggacaaggcccgcgccgtcgaacattttctctactacctcgcgcaccacccggccctcaatggcctgagccgccccaccgtgctgctgggccataccaagcgctacgacgccatcgcccagacgatcacccagggcagcgccgcccctttcaacttccaggtgcagcgcctggacctggccgccagcgacaccctggctcaggccatcgaagcctgcgacctgtacctgtttctctacgactcctccaccttgcccaaccctcgcgccgaaggcccggactttatccgtgccctgcaaggcgtgatggccgaacactggaaaaaatccctgctgttcaaggattatggcgactatttctatgacaccttcagcgtcgagccccaacgcattgccgacctcaatgccacgctgatccggcgcatgtcccaggccaacgtgctgagctttaccgacaaacatggctcacggctggaagcgccgatgagcagcatcaagaagtggaccaatatcaatggggtcggcaaccacgatctggccccgggcgagatcgccacccacagtgaggctatcaatggtcaggtgcggtttgtcggcacctttctcagcaccatcccgtttgcgcgcaaatatggtgtgctgcaatcgccgctggagttgtggatcgagaactcgaccatctgcagcgtggccagtgaagtgccggggttggccgatgatttcaacaagtacctgaatgccaacccgtcgaaccggcgtgtggaagagttggggattggtaccaatgaaggggtgaaggatctgtatgcgcgcaacgccgggttcgaggagcgccattgcgggttgcacctgggcttgggcggtgggcagaaaggcagccatcacctggatttgatctttgccagtggggtgttggcgctggatgacaagccggtgtttgatggggcctttgcgttctgagcaaagcgttaactaacgctgaaaatctgaatgtgggagggggcttgcccccgatggcagtcggtcagttgatgtgtgtggtggctgccacaccgttatcgggggcaagccccctcccacattttgaacgtattccaaggcaaaaaaaaacgccaacccgagggttggcgttttttatgcggcgatcaaatcactgcggcttcttgcggccaaaaccaggacgctggccggaaccggccggggcgccacggcgcttgccagacggctcgtccgcgaccagtttcgggccgggacgcttgttagcggcaggcttggctggacgcttggtgctggcgttgtcggccgggcgatccgcttcaccccggttgctgcggccacccgatggggcaggacgcggcgcacgtggcgcacgctcgccttcctgacgcgacggcgcggttgggcggcgctcaccttcgatctgcggctcacgggaaatacgaccgccggtcgccggagcattcaacgccgggcgcagggtgcgggcaacccgctcggtgcgcgccaccgggcgcgacgatttacgctgcatacgctcaagcttgtctttgctcttggcgttcatctgcggcatcgccaccggcgtcaggccgacttcggcactgaggatgtcgacttcgtactggctcatttcgcgccagcggcccatcggcaggtcggagttgaggaataccgggccgaaacgcacgcgcttcaggcggctgaccaccaggccctgggattcccacaggcgacgcacttcacggttacggccttccatcaccacgcagtggtaccagtggttgaaaccttcaccacctggcgcctgcttgatgtcggtgaacttggccgggccatcttccagcaccacgcccgccttgaggcgctcgatcatctcgtcgtcgacttcgccgcgtacacgcacggcgtactcgcggtccatctcgtaggacgggtgcatcaggcggttggccaattcaccgtcggtggtgaacatcagcaagccagtagtgttgatatccaggcgaccgatgttgatccagcggccttctttgggcttgggcatcttgtcgaacacggtcggacggccttccgggtcgtcgcgggtgcagatctcgccatcgggcttgttgtacatgatcacgcggcgcaccgattcggcggcctcttcacgcttgatgaccttgccatcgatggtgattgcgtcgtgcaggtcgacgcgctggccgagggtagcctcgacgccgttgaccttgatgcgcttctgggtgatccaggcttcgacgtcgcggcgcgagcccacgccgatacgcgccagcaccttttgcagtttttcgcctgctgggccgatttcctggctgtcgttctggtctttgtcgttcatcttaagcacctcccggtgggtcgattcaggcgtggcctgaagagtgttgaaagcggggctttggccgaatagctcggcaaagggtcgcgaatcatacgcgcatggcgcgcgttgcgcatcagagactagtcgattagtggccggcaatcggtttttccgccgaccggtgggccatgtgggatccgggtcaatcttcgaactggcgacgctcggcctcgatagcttcggccagggcccgggcttcgtcttcttcgtcgctcagcggcggctgttcgagggcggcgacggcggccaggagtttttcacgggcttcggcgacgccgaggatgtcttcttcaggttcgggctcaggttcagggtcaacggtttcctggggttctgcctcagtcgcaccatcgcgcagcaagtcatcaaagtcggtcttgatgccctgctccatgtcgtccagttccagcagcaaggtgtggaagctggtttcgtccttcggttcttccggctctgctgtcgcatcggcgagctcctgcaggctggccggcaccggggcatcgtcgaagtcgagcaccggctccgcttccatttcgcgcaattcggccagcggcggcaagtcgtcgaggtttttcaggttgaaatggtcgaggaacaccttggtggttgcaaacatcgccggtttgccgggcacgtcacggtaaccgacgatgcggatccactcgcgctccagcaacgtcttgacgatatggctgttgaccgccacgccccgcacgtcctcgatctcaccccgggtgatcggctggcgataggcgatcagcgccatggtctccagcatcgcccgagaataacgctgggggcgctcttcccacaggcgtccgacccaaggggaaaatttctcacgaatctgcaggcgataacccgacgccacttcgcgtaattcaaaagcacggccgtcgcaggatttgcgcagaatctccagcgccttcttgaacaccggcggctcgggacgttcggcctcttcaaagagctcgaacaaacgctccagggattgcggtttgcccgacgccagtaggaaagcttccagcagcggtgccagttcgcggggttcagtcagattcatcgattcagctctttattcggctcgcgcccgcacgtggatagccgcaaaaggctcattctggaccagctcgaccaacgactccttgaccagttcgaggatcgccataaacgtcaccaccacccccaggcgcccttcttcggcggtgaacagctcgacaaacggcacgaagccgccgcccttgaggcgctccagcacgtcgctcatgcgctcgcgggtggacagcgcctcgcggctgacctggtgactttcaaacatatcgccccggcgcagcacctcggccatggacatcagcaattcttccaggctcacgtccggcaacagtttgcgcgcacgggcctcgggggcatccagcttgggcaccacaacgtcgcggcccacccggctcaggccatcgatgccttcggcggcggccttgaagcgttcgtactcctgcaggcgtcggatcagttcagcgcgtgggtcgtcttcttcggcctccaccgtctccgagcgcggcagcagcatgcgcgacttgatctcggcgagcatggcagccatcaccaggtactcggcggccagctccaggcgcaccgactgcatcagctccacatagcccatgtactggcgcgtgatttccgccaccggaatatcgaggatgttgatgttctgcttgcggatcaaatacagcagcaaatccagcgggccttcgaaagcctccaggaagacttccagcgcgtccggcggaatgtacagatccaggggcatttccatgaccgcctggccgtacaccatggcaaacggcagttcctgctgggcgcccgcctggctgtcgacggtttccacggctgacattcaggcctcgaccatgaacggcgccgggtcgccgcaacccacgcggatcacttcgggttcgccgtcggccaggttgatcacggtggaagctttgccgccgccgaaaccgccgtcgatgatcaggtccacctgcttttccaggagctgacgcatttcatacggatcttccaggggatgggtgtcgccgggcatgatcaacgacacgctcatcaacggctcacccagttcttcaagcagcgccagggcaatgggatgctctggcacccgcaggccaatggtgcgcttcttcgggtgcagcagcaggcgcggcacttcgcgggtggcattcagaataaaggtgtagggccccggcgtgtgagccttgagcaggcggaaggtgccggtgtcgaccttggcgaacagccccaactgggacaggtcactgcagatcagtgcgaagttgtgcttgtcgtccaactggcgcaggcgtcttacccgctcgacggcgcccttgtcgccgatctggcaaccaatggcgtaggacgaatcggttgggtagatcaccacgccgccggcgcggatgatctcgacggcctgtttgatcaggcgcgcctgggggttttccggatgaatctggaagaattgactcacgtgttctacctgttcagacggtggcaataatggggtcatgcttgaatcgcccccacaagagcggcaaatcttccgggacggggcgatactcgccgatctcggaccagccgcctgggccatgaaaatcactgccggcactgaccagcagaccaaattcgcgggcaagaatcgccaggctgccgacctgctcggcgggttgatgcccgttgaccacttcgattgcgtggccgcccgctccaatatagtcggcaatcagcttgcggcgcttgctgcgggtgaaatcgtagtgccagggatgggccaggctgacccaggccccggaggcccgcagggtctcgacggtgtcctccagggtcggccagtgttgcttcacatcacccaacttgccggcgcccagccatttgcggaacgcttcggcgcggtcctttacaaaaccttcacgtaccatccagtcggcaaagtgcggccgcgcgggtgcgttgccgctgtcacccagttcctgctggatggcgcgggcgccttccagggcaccggacatgcctttaaggccgagcttgcggcttatttcttcggaccgcagccagcggccatcgtgcaactgggcaatggcggcgaccaaaggcggggctttttgatcaaagccgtagccgagtacatgaatggtggcgccaccccaggtgcaggacaactccacaccgttgaccagctgcatgcccaacgcatgcgcggcttcgcgggcttcgtcgaggccttcgagggtgtcgtggtcggtcaacgccaggactcgcacgcctttttcaaacgcacgcgcaaccagtaacgcaggcgccagggcgccgtcggaggccgtgctgtggcagtgcaaatcaacattcacggggatgtgtaacctcaagtcagctggcgctttcgctaccaaggatgtttgttattatgccgccacatccagcttctggctcttactgtgaaacaattcatcgacttcatcccgctgttgctgtttttcatcgttaccaagctcgaccccagggtcatcgaaatcgccggtcatgcgttctcgttcgggggcatctacagcgccaccgccgtactgatcatcagttctatcgtcgtctacggcgccatcttcatctcccagcgcaagctggaaaaaagccaatggctcaccctggtcgcgtgcctggtattcggcggcctgaccctggccttccacagcgaaaccttcctcaaatggaaagcgccggtggtgaactggctgttcgccctggtgtttatcggcagccacttcatcggtgaccgcctgttgatcaagcggatcatgggccacgcgctgaccctgccggatccggtgtggacacgcctgaacgttgcgtggatcgtgttcttcctgttctgcggcgccgccaacctgttcgtggcctttaccttccaggactactgggtcgacttcaaggtcttcggcagcctggccatgaccgtgctgttcctggtcggccagggtatctacctgtcgcgccacctgcatgacgtcgcccctaccaccccgaaaaccgaggattgacatgctctacgccatcattgccaccgacgttgccgactcgctggaaaaacgcctgagcgtgcgcccggcccatgtcgagcgcctcaagcagttgcaggccgaaggccgtatcgtgctggcgggtccacaccctgcggtagacagcaacgacccaggcgacgccggtttcaccggtagcctgatcgtcgccgagtttgcctccctggccgatgcccaggcctgggccaaggctgatccttatgtagctgccggcgtttacgccgacgtcgtgatcaagccgttcaagcaagtcctgccttgataacggccacgccgaacctaatcggttcggcgcgctcctaattgctcattattctcggtaacctgccgacaacgttctgaatattcgtgtggaatcaggagttccgatgcgcttacgtcagttgtgtctgttggcagtggtaatgatcggggctacggcccacgctgaagaaacctcgaacaccggcagttccacgcctctgtccttgagtgccggcgcccagatcaccgagttgcagcagcggttgaaagaaagcgaacgccagcgtgaagaattgagcaagcaactgcaaaacgtagatgctacccgcgaaagcgcccaactgagtcgccttcgccaagagaaccaacgcctggcccagcaactcaaagaaacacagggcggcgccttgacccgatggctgaccgagcagcaacaatggttcgtcaccggtggggccgtggcgctgatcgccttgctgtgcgggatcttcgccagcggtgggcaccgtcgccgtcgacaatggctaaattgagtgagtcatgagcgagctgttactgatagatgatgaccaggagctctgcgagctgctgaccagttggttgagccaggaaggcttccaggtacgcgcctgccatgacggtttgagcgcccgcaaagccttggccgacagtgccccggccgcagtggtactcgacgtgatgctgcccgacggcagcggcctggaactgctaaagcaattacgcaacgaccacccggagctgccggtgctgatgctgtcggcgcgcggcgaaccactggaccgcattctcggcctggaactgggtgccgacgattacctggccaagccctgcgacccacgcgagctcaccgcacgcctgcgcgccgtgctgcgccgcagccacccggccgccgtgtccacccagctcgaattgggcgacctgtgtttcagcccggtgcgcggcgtggtcagcatcgatgaacaggaattttccctcaccgtctccgaaagccgcctgctggaagccttgctacgccagcccggcgagcccttggacaaacaggaactggcgcagatcgccctgggccgcaaactgaccctttacgatcgcagcctggacatgcacgtgagcaacctgcgcaaaaagatcggcccgcacccggacggccgaccacgcatcgtggcgttgcgcagtcggggctactattacagcctttgaagcagctatcagttgccgccttccccttaccaaacctttaccctctcctgacggcggctgaccttgatctccgtaatctactcacatccggactcaccggaatagagacaggagaatcaccatgcgcaagacccttatcgctttgatgttcgccgctgccctgccgaccgttgccatggcggcaatgcccgaaggcccaggcccgatgggcggccccgaaggccatatgatgggtggcccgggtcacgacggcgaacacggtccgcgtggcaaaggcggccccttcagccaactggacctgagcaaggaacagcgccagcagatcggcaaactgatgggcgaccaatggcacgctcgcaaggacctgaccagaaagtacctggacaagctcccggctgctgaccagaaggccatgcaggacgaaatcgccgccggcaagcagaaaacccaggcggatatccgtgcgctgctcaagccagaccagcagaagaaattcgacgagatcgtcaagcagcaggaacagcgccgcgccgaatggaaggaattccaggcctggaaagcgcaacagccgcaaaaagcgcaataatgccctcgcgttaacgctcccagcccagtggcccccgccactgggcttttcctgcttgagggtttcctgtgcgttcattgttctggcgcatcctggccagtttctggctggccatcgccttggttgccgggttgtcgatcctgcttgggcatatgctcaatcaagatgcctggattctcagccgtcaccctggcctcaacaacctggccgaagagtggacccaactctacgaaacccagggtgaggacgctgcccaggagttgctgcaacagcgcaaacgccagtaccacatcgacgtgcaggtgctgaacgaaagcggcgagccggtggtgcgcggcaccttcccacgccgcgccgccgccttcgaagcccgccagaacgatagcaaggacggccacctgccctggcgccgcctgaccgctgaatacaccagtgagaagaccggcgacacttacctgttgatctaccgcatcccgcacccggaactggacgaatggcatcgcagcagcctgacatggcctttgagcgcattggtcatcgccttggtggtgctgaccctgttcagcctgttcgtcacactgtccatcacgcgccccttaagccgactgcgcggcgcagtgcatgaccttgggcaagccacctaccaacaaaacagcctggcgcaactggccaaccggcgcgatgagttcggcgtactggccaccgacttcaaccgcatgggcgcgcgcctgcaaagcctgatcggcagccagcgccagttgctgcgcgacgtgtcccacgaactgcgctcgcccctggcccgcctgcgcatcgccctggccttggctgaacgcgccagccccgaagaacgcgaaagactctggcctcgcctgacccgcgaatgtgatcgcctggaggctctgatcagcgagattctggtactggcccgcgtcgatgccgataacgccagcgccgaagaaatcgacctcaacccgttgctcaagaccctgcaaaaagacgcacagctcagcgcgccggatcaggtggtgcagctcaccaccgacaccgaactgcacctcaaggggtggccgaccatgatcgaacgggcagtggataacctgctgcgcaacgcccagcgcttcaacccgccgggccagccgatcgagctacacgcccaccttcacggcgagcatattgtgatcagcgtgcgcgaccacggccccggcgttgacgccgaacacctgagccaattgggcgaaccgttctatcgcgccccaggccagaccgcacaaggccacggtctgggcctggcgattgcccgtcgcgccgccgagcgccatggcggcaacctgttcctggccaatcatgcccaaggcggttttatcgccagtatcgatctgccgctggaacctgggattgtcacaccggcctgatcatcttctatagtggcccttctcttacggagggccgttgatgactgacctgctgactcccatccaagccgcactcgatctaccgcgcacgccgctgaccagcaccgaagccggcgccctgccctcggcctttgccgtcaccgacctggcggttgccagtatcggtgccgccggccaggccgtggcccagttgatcctgcaacagaccgggcgactgcccggcgtgagtgtggaccggcgactggcgtccttctggttctcgtcatcgattcgcccgataggctggaaaacgccaccgctgtgggacccggtggccggtgactacgcctgcgccgatggctggattcgcctgcacaccaacgcgccccatcaccgcgccgccgctgaacgggtactgggcaaggtggctgatcgcatcgcgatggccggcaaggtagccaattggaatgccgccgaactggaacaggcgattgtcgatgaaggcggttgtgccgcgcagatgcgtacctggcaagcctggcaaacccaccctcagggcctggccgtcaatgccgaggcactggtgcagcgccagaccttggcaacctccgtcgacaaaccctggctcggctcggtggcgcgtccactggcgggcctcaaggtattggacctgacccgcgtgctggccggcccggtggccagccgtttcctcgcagggctgggtgcggatgtattgcgcatcgactcaccgacctggaacgagcccggcgtagtgccggaaatgaccctgggcaaacgctgcgcccgcctggacttgaagagcgcccaaggccgcctggttttcgaaagcctgctcaaggacgccgacattgtgttccacggctaccgcgccgacgccctggaacaactgggctacagtgccagtgaactgcaaacccgcgcccccggcctgatcgacgtgagcctcaacgcctacggttggagcggcccgtggcgcaaccgccggggtttcgacagcctggtgcagatgagcagcgggattgccgccgcaggcatggcctggaaacacgcggacaaaccggtgccgctgccgttgcaggcactggatcacgccaccgggtatttgatggcggccagtgcgattcgggcattgagcgaacggttgaaaaccggccgtggcggttcggcgcggttgtcgttggcgcgtacggcgaagttgctggtggacgccgggcaggtgccggagcagccggcattgcgggccgagcaaccgagcgatcaaggcctggtagtggaacagacggcctggggccaggcgcatcgattgttgccgccggtgactatcagcggcacgccgttgcagtgggatctgccggctggggaactgggttcacaccgagcgcagtggtgactcgactatcgccatcgggggcaagccccctcccacatttttggatgttgttcacaaatcaaactgtgggagggggcttgcccccgatgaggcccgtaccgtcactatcaatccacccgttgcaacgaagtccacaaatgctgcgccgcatacgcccgcaacggccgccacgcctcggcccgcgccagcaactgccgcgccgacaccggcccgccctccaacgccgccagcgcattgatcaagccgatatcccccgacgcaaacgcatccgtctcgcgcatctggcgcatggcgatgtattgcgcggtccagtcgccaatccccggcaacgccaccagccgggccacaccatccttgaggctggccttggcttcgaacagctgagggtcatccagcaacgcctgcgcgacgccggacaaggtccgtccacgcgccttcggcatgcccagggtggccaggtccgctgccgccaatacttcggccgaggggaacacatgggtgataccgacgtacggcgtctccagcggctggccatattgcgccaccagcttgcccgctaggcgaatcgccgccaccacggtaatctgctggcccagcaccgcacgaatcgccagttccaggccatcccaggtgcccggcacgcgcaggcccggacgggccgcgaccaactgcgccatcaagggatccgtcgccaattgcgggttgatcaactggggctgcgcatccagatcgaacatcgtgcgcaggcgccgttcgatctcaggcaacgccgccgggtctggaaaacccacctcgacgtctagccaatcgccatcccccagtgccacgctgatccagccgtgctgcccgccgaggctgatactgcgccggtacacccccgcctcgaccgtctccatcccgccgatcgcccgcgccgacagaaaccccaccatcgccgcccaatcataaggcggctgatacgccagtctcacaacgacaacaccccgctgtacagcccatacgccgccagccccgcgccggtgatcacacagctgaaaatgcctttttccatgtgggtaaacaagggctggcgctgctcacgcttggcgagggcaaacaggatcacccccggtgcatacaacagcgccgacagcagcaggtacttcaagcccccggcatacagcagccacacggcgtagccgagagcgatcaggcccaccagcaagtccttcaaacgctggccgtgggcgtcttcgtaggtttcgccgcgcccgctcaacagcacggcatacgcggccgaccacaggtagggcaccaggatcatcgatgaggccaggtaaatcagggtcgtgtaggtgctgtgggaaaacagcgtgatcaccaggaagagctggatcatcacattggtcagccacaacgcgttgaccggcacttgattggcgttttccttcttcaggaacgccggcatggtcttgtcatgggccgtggcgtagaggatttccgcacaaagcagcgcccaggacagcaaggcaccgaccagtgacaccgccaggccgatgctgatcgccatcgccccccaggggccgacgatatgttccagcacgccggccagggacgggttttgcaattgcgcgagttccggctggctcatgatgcccagggacagcacattcaccagcaccaacagggccagcacgccgagaaaaccgatcagcgtggcgcggcccacgtccgagcgtttctcggcccgcgccgagtacacgctggcaccctcgatgccgataaacacaaacacggtgaccagcatcatgttgcgcacctggtccaccacgttgcccatattcgggttgcccaggccccagatatcgcgagtgaagatatccgccttgaacgccacggcggcgatcacgataaacatcagcagcggcacgatcttcgccaccgtggtgatctggttgatgaacgccgcctccttgatcccgcgcaacaccaggaaatgcacggcccacagcagcaacgaggcacagccgatcgccaccggcgtgttgccctggccgaacaccggaaaaaaatagcctagggtactgaacagcaacacgaagtaaccgacgttgcccatccacgcgctgatccagtagccccaggccgacgagaaccccatgtagtcaccgaacccggccttggcgtaggcatacacgcccgaatccagttcgggcttgcgattggccagggtctggaacacgaaggccagggtcagcatgccgaccgcggtgattgcccaaccgattaacacggcccccacctcggcgcgtgcggccatgttttgtggcaaggaaaaaatcccgccgccgatcatcgagcccaccaccagggcaatcagggcaccaagtcgcagtttctgggccggttgagacatgaacactcctaaatgaacaacaacttgagctgacaacggtgcactcggctaattaactcagcgagtgtagcgtttattagtgaaggcgataaaaccaggaggctcataacgcaatcgcatgtcaggcattcgagtttagtcttatttagaatttaaataccggattgtctgaccgttcgcgaaacgcctttcgaaatgtttgcatattcaagaatacggtctagcttaaaacctccatagcgctgactaaatgattaaccaaaaggaaagaatggctctgcgtcaatactttccgaggattcttatcgcccacgagtttccagcctaagtcattaattcacaatggaatgtgccaatgaagtgatctgagtcagctgtttgattagcgcacggatttattctgtggtctctcttctcctgcattggagttatgcgatgtctgaatctcccggaaaacttcgactgggcgcactggttgcacttgtcgtgggctcgatgattggcggcgggatcttttcactgccgcaaaacatggccgccagtgccgatgtcggcgcggtattgattggttgggtgattaccgccatcggcatgttgaccctcgcctttgtgttccagaccctcgccaaccgcaagcccgacctcgacggtggcgtatacgcctacgccaaggccggtttcggcgactacatgggtttctcgtccgcctggggttactggatcagtgcgtggctgggcaatgtcggttacttcgtgttgctgttcagcaccctgggttacttcttccccattttcggcgaaggcaacacgccggctgcggtgatcggcgcctcggtgctgctgtgggccgtgcacttcctggtactgcgcgggatcaaggaagcggcgttcatcaacctggtgaccaccgtcgccaaggtcgtgccgctggtgctgttcgtgctgattgcgctgttcgccttcaagctggagatcttcaccgctgacatctggggcgtgaaaaaccccgacctgggcagtgtaatgaaccaggtgcgcaacatgatgctggtcaccgtctgggtgttcatcggcatcgaaggcgcgagcatcttctcgtcccgtgcggaaaaacgctccgacgtcggcaaggccaccgtgatcggctttatcaccgtgctgctgttcctgatgctggtgaacgtgctgtccctggggatcatgacccagccggagctcgccaagttgcagaacccgtcgatggccgccgtgctggagcatgtggtgggccactggggcgcggtgctgatcagcgtcggcttgatcatctcgctgctgggggcgctgctgtcgtgggtgctgctgtgtgcggagatcatgttcgccgccgccaaggaccacaccatgccggagttcctgcgcaaggagaacgccaaccacgtaccggccaacgccctgtggctgaccaacgccatggtgcagatattcctggtgatcacgctgttttccgccagcacctacctgtcgctgatctacctcgccacctcgatgatcctggtgccctacctgtggtcggcggcctacgcgttgctgctggcggtgcgcggcgagacctatgaaaacgccctgcgcgaacgcaagaaagacctgttcatcggcgccatcgccctgatctacgcggtctggctgctctacgccggcggcaccaaatacctgctgctctccgccctgctctacgcccccggcgcgatcctgttcgccaaggccaagcatgaactgggcaaaccgattttcaccaacgtcgagaagctgattttcgccgcagtagtcattggcgccctggtggcggcctatgggctctacgacggcttcctgactctgtaattctgactggaggatctgtaatgaccacggaaaaagtgaagtacggcgtacattccgaagccggcaaactgcgcaaagtcatggtgtgctccccaggtttggcccaccagcggctgacccccaacaactgcgatgaactgctgttcgatgacgtgctgtgggtggcccaggccaagcgcgaccacttcgacttcgtgaccaagatgcgcgagcgggacattgatgtgctggaaatgcacaacctgctcaccgacatcgtcgccatccccgaagcgctggactggatcctgaagcgcaagatcaccgccaacacggttggcctgggcctggtcgacgaagtcagctcctggctgcgcagcctggagccacgcaaggccgccgagttcctcatcggtggcgtctcggccgatgacctgccgagccaattcggcggcaagaccatcgaaatgttccgtgacttcctcggccatgccagcttcatcctgccgccgctgcccaacacccagttcacccgcgacaccacctgctggatctacggcggcgtgacgctcaacccgatgtactggccggcgcgacgccaggaaaccctgctggcctcggccatctacaagttccaccccgagttcaccaacgccgacttccagatctggtacggcgaccccgaccaggagcacggcgccgccaccctggaaggcggcgacgtgatgccgattggcaacggcgtggtcttgatcggcatgggcgagcgctcgtcccaccaggccatcggtcaactggcgcgcaacctgttcaagaacaaggcggtggaacgcgtgatcgtcgccggcctgccgaaatcccgcgcggcgatgcacctggacaccgtgttcagcttctgcgaccgcgacctggtgaccatcttccccgaagtggtcaaccagatcgtgcccttcaccctgcgcccggatgaaagcaagccacacggcatcgacatccaacgcgagaaaaccaacttcctcgaaaccgtcgccgcagccctcaacctcaaggcactgcgtgtggtcgagaccggcggcaacagcttcgccgccgagcgcgaacaatgggatgacggcaacaacgtggtggcggtagagcctggcgtggtgatcggttacgaccgcaacacctacaccaacaccctgctacgcaaggccggggtggaagtcatcactatcagcgccggtgagctcggccggggccgtggcggcggccactgcatgacctgcccgatcatccgcgacccaatcgactactaaggagactccatcatggctttcaacatgcgcaaccgcagcctgctgtcgctgatgcaccacaccacccgcgagctgcactacctgctggacctgtcccgcgacctcaagcgcgccaaatacaccggcaccgagcgtccgcacctgcaaggcaagaacatcgcgctgatcttcgaaaaaacctcgacccgcacccgctgcgccttcgaagtcgccgcccatgaccagggcgcccacgtcacctacatcgacccggtgtcgtcgcagatcggccacaaggaaagcatgaaagacaccgcccgcgtgctcgggcgcatgtttgatgcgatcgagtaccgtggcttcgagcaggaaatcgtcgaagagctggccaagttcgccggcgtgccggtgttcaacggcctcaccgccgaattccacccgacccaaatgatcgccgacaccctgaccatgcgcgagcacagcgacaagccgctgcatgacatcagctacgcctacctgggggatgcgcgctacaacatgggcaattcgctgctgatgatcggcgccaagctgggcatggacgtgcgcatcggcgcacccaaagcgctgtggccgcacgcggacttcatcaagcaatgccaggcgtttgccgaagaaagcggcgcacgcatcaccatcaccgaagacccgaaggaagcagtgaaaggcgtggacttcatccacaccgatatctgggtgtccatgggcgagccggtggaagcgtgggacgagcgcatcgagcaactgctgccgtaccaggtcaacgccaagatgatgaaagcctcgggcaacccacgggtgaaattcatgcactgcctgccggcgttccacaacagcgaaaccaaggtgggcaaggacatcgccgcgcggtacccgaacctggccaatggcgtggaagtgaccgaagaggtgttcgagtcgccggccaacatcgcgtttgagcaggcggaaaaccgcatgcataccatcaaggcgattctggtgtcggcactcgcagatatctaaaaaatgtgggagggggcttgcccccgatagcggtacatcagtaataaaagtgctggctgaaacaccgcaatcgggggcaagccccctcccacactaaccgcgttcacaacgatgaatttcatcagaaggacattctttatgcgcatcgtcgtagccctgggcggcaacgccctgctccgccgtggtgaacccatgaccgcggacaaccaacgcgccaatatccgcatcgccaccgaacagatcgccaagatccatgccggcaacgagctggtgatcgcccacggcaatggcccgcaagtcggcctgctgtcgttgcaggcagcggcctacacccaggtctcgccatacccgctggacgtgctcggcgccgaaaccgaaggcatgatcggctacatcatcgaacaggaactgggcaacctgctggacttcgaagtgcccttcgctaccctgctcacccaagtggaagtggacgccaaggaccccgccttcaagaacccgaccaagcccatcggcccggtgtattccaaggccgaagcggagaaactcgccgccgaaaaaggctgggccattgcgccggatggtgacaagtaccgtcgcgtggtcgccagcccacggcccaaacgcatctttgaaatccgcccgatcaagtggctgctggaaaaaagcgccatcgtcatctgcgccggcggcggtggcatcccgacgatgtatggggaagacggcaagctgcgcgggattgaggccgtgatcgacaaagacttgtgttcttcgttgctggcctcgcaactggaggccgatctgctggtgatcgccaccgacgtcaacgcggccttcatcgactacggcaagcctacccagaaggccatcggccaggcccaccccgacgaaatggaaaagctcggcttcgccgccggttccatggggcccaaggtccaagcggcctgcgagttcgcccgcaagactggcaaaaccgccgtcatcggttcactctcggacatcgaagccatcgtccagggcagtgccggtacacgcatcagtacggcaacacctggcatcacctatctgtgaagtagaggagagacgcctatggccacctttgaacccggtcacttacatgttgaacgtcacgcactgaatgcccaggactacagctacaacctgtgcatcgactacgaagtcagccaggacccaaaggaaggcaagggcatgctgttcaagctgcatggctcggtgcagggcaaggacctcaaggaagagttcttcctgcccaaggaccaggcattcgactttgcgcggcatgcgatgaacatcgcgcagaagtatgggatgccgaaagtcgcggtgttgaacggctcgatgcacaagcagtacgacttgatgttcgaggatgtgcggcatcaactggatgtgaaggccggggacccgatcaagccggaacacctggaataactggcacaactctgctccaactgtgggagggggcttgcccccgatagcggtgcatcagttacaaattggctgactgacacaccactatcgggggcaagcccctcccacattttgatctccaccctctgcaaggcatacttgctgcctctcgcgtcccagaattgtcagcagccccatgcgtatccacgtcagcttcatcgaccgcgtcggcatcacccaggaagtcctggccctgctcggtgggcgcaatctcaacctggatgcggtggagatggtgccacccaacgtctacatcgacgcaccgaccctcagcgccgaggtgctcgaagagctgcgcgatgcgctgttcagcgtgcacggcgtgcaggcggtgaccgtggtggacatcctccccggccaacgccgccacctgcaactcgacgccctgctggccgccatgaccgacccggtgctggcgctggacagcgcgggcaagatcctgctggccaacccggcgctgatcgccctgtacggccgcgaaccggccggcgaaagcatcagcgagctgtttaatgacccggcgctgctcgacaccttgctggaacacggctttcgcttgccgctgcgcgagatcagcgtcaacggccagaccctgctgctggacgccacgccgatcaccgacgcgggcgccttgctcaccctgtatcaacccaaccgcatcggcgaacaactgtcggcgctgcaccatgaccatgccgaagggtttgatgcgctgcttggcgagtccccggtgatccgcaccctcaaggcgcgtgcgcagcgggtggcggcgctggatgcgccgctgttgatccagggcgagacgggcaccggcaaagaactggtggcgcgtgcctgccacgccatcagtgcccgccacagtgcgccgttcctggccttgaactgcgcggcgctgccggaaaacctcgccgaaagcgaactgttcggctatgcgcccggcgcctttaccggcgcgcaacgcggtggcaagccaggcctgatggaactggctaaccagggcacggtgttcctcgatgaaatcggcgagatgtcgccgtacctgcaggccaagctgctgcgttttctcaatgacggcagcttccgacgcgttggcggcgaccgtgaagtgaaggtcaatgtgcgcatcctcagcgccacccaccgcgacctggagaagatggtcagcgaaggcaccttccgcgaagacctgttctaccgcctcaacgtgctcaacgtcgaagtgccgcccctgcgtgcacgcggccaggacatcctgctgctcgcccgctatttcatgcagcaggcctgtgcgcagatccagcgtccggtttgccgcctggcgcccggcacttacccggcgctgctgggcaaccgctggccaggcaacgtgcggcagttgcagaacgtgatcttccgcgccgccgccatctgcgaaagcagcctggtggatatcggcgacctcgacatcgccggcacctcggtggcgcgccagagcgacggcgaaatcgacagcctggaacaggcggtggaagacttcgagcgcaacctgctggaaacgctctacaccagctacccctcgactcgacaactggccagccggttgcagacgtcccatacggcgattgcccatcgtctgcgtaagtacggcattcccaacaagccttgagtgacatggttaaaaatgtcggagcgcattgcaatgttggtctgagaacgacatcgcgtgtactgaaagcgctacagcgtaacgatatcgctacaatcctgttttttgcgcgccatgcaaggctttgatccacataggctttttttcacaggcccaactgtagcgaaatcgctacaggcaaaatgcatatcgtcataaccaattttatcaagtcattgagttatataggattaatgacgttggccgcgatattgctaagcaactccccattattccaatcccgtccaccagacgaatctggccctgaggagtttccatgagcgagttgcgtttcactgaagatcacgaatggctgcgcgccgaagctgacggcagcgtcaccgtgggtatcaccgctttcgcgcagaacgcgctgggtgatgtggttttcgtgcaactgccggagttgcaggcctacgacaagggcgccgaggcgtccaccgtggaatcggtcaaggccgccagcggcgtgtacatgccgctggacggggaagtcctcgaagtgaacgacaagctcgacggcagcccggaactggtcaacgaagacccgatgggcgaaggttggttcttccgctttaaaccggccgatgccggggcagtcgctaaactgttggatcaggacgcgtacgatcgcctgatcaaagccaacgctgaagcttgaggagcgcgccatgaccgttaatctcaccaccgccaacgaattcatcgcccgccacatcggcccgcgccaggaagatgagcagcagatgctcgccagcctgggttttgactccctggaagccctgagcgccagcgtgatcccggaaagcatcaagggcaccagcgtgctcggcctggaagacggcctgagcgaagccgaagccctggccaagatcaaggccatcgccggcaagaaccaactgttcaagacctacatcggccagggctactacaactgccacacgccgtcgccaatcctgcgcaacctcctggaaaacccggcctggtacaccgcctacaccccgtaccaacccgagatttcccaaggccgcctggaagcgctgctgaacttccagaccctgatcagcgacctcaccggcctgccgatcgccaacgcctccctgctcgacgaagccaccgccgccgccgaagccatgaccttctgcaagcgcctgagcaagaacaagggcagcaacgccttcttcgcctcgatccacagtcacccgcagaccctcgacgtgctgcgcacccgtgccgagccgctgggcatcgacgtggtggtgggcgatgagcgcgaactgagcgacgtcagcccattcttcggcgccctgctgcaatacccggccagcaacggtgacgtgttcgactaccgcgaactgacggagcgcttccacgccgccaatgccctggtggccgtggccgccgacctgctggccctgaccctgctgaccccgccgggtgagttcggcgccgacgtggccatcggcagcgcgcaacgcttcggcgtgccgctgggctttggtggcccgcacgcggcgtacttctccaccaaggatgcgttcaagcgcgacatgccgggccgtctggtcggcgtgtccgtcgaccgtttcggcaagccggccctgcgcctggccatgcagacccgcgagcaacatatccgccgcgagaaagccacgtcgaacatctgcaccgcccaggtattgctggccaacatcgccagcatgtacgccgtgtaccacggccccaagggcctgacccagatcgcccgacgtgtgcaccagttgaccgcgatcctggccaagggcctgactgccctgggccagaacgtcgagcaaacccacttcttcgacaccattaccctgaacaccggcgccaacactgccgccctgcacgaaaaggcccgtgcccagagcatcaacctgcgcgtcgtggacggcgagcatcttggtgtgtcggtggacgaaaccaccacccaggccgatatcgaaaccctgtgggcgatcttcgccgacggcaaggccctgccggacttcgctgccaaggttgaaagcaccctgccgaccgccctgctgcgtcagtcgcctgtgctcagccacccggtattcaaccgctaccactccgaaaccgagctgatgcgctacctgcgcaaactggccgacaaggacctggcgctggaccgcaccatgatcccgctgggctcgtgcaccatgaagctcaacgccgccagcgaaatgatcccggtgacctgggccgagttcggtgccctgcacccgttcgccccggccgaacaaagcgccggctacctgcaactgacgtccgaactggaagcgatgctctgcgcggctaccggctacgacgcgatctcgttgcaaccgaacgccggttcccagggtgagtacgccggcctcctggccatccgtgcctaccaccagagccgtggcgaagaacgccgcgacatctgcctgatcccgtcgtcagcccacggcaccaacccggcaaccgccaacatggccggcatgcgcgtggtcgtcaccgcgtgcgacgcccgtggcaacgtcgacatcgaagacctgcgcgccaaggccatcgagcaccgcgagcacctcgccgcgctgatgatcacctacccatcgacccacggtgtgttcgaagaaggcatccgcgaaatctgcggcatcattcacgacaacggcggccaggtgtacatcgacggcgccaacatgaacgccatggttggcctgtgcgccccaggcaagttcggtggcgacgtgtcccacctgaacctgcacaagaccttctgcatcccccacggcggtggcggcccgggcgtcggtccgattggcgtcaagtcgcacctcacaccgttcctgcctggccacgcggccatggaacgcaaggaaggcgcggtgtgcgcagcgccgttcggcagcgcaagcatcctcccgatcacctggatgtacatcagcatgatgggcggtgcgggcctcaagcgcgcttcgcaattggcgatcctgaatgccaactacatttcccgtcgcctggaagagcactacccggtgctgtacaccggcagcaacggcctggtagcccacgaatgcatcctggatctgcgcccgctgaaggacagcagcggcatcagcgtggatgacgtggccaagcgcctgatcgacttcggcttccatgcgccgaccatgtcgttcccagtggccggcaccttgatgatcgagccgaccgaaagcgaatccaaggaggaactggaccgtttctgcaacgccatgatcgccatccgcgaagaaatccgcgcagtggagaacggcacgctggacaaggacgacaacccgctgaaaaacgccccgcacaccgccgccgaactggtgagtgagtggacccacccctacacccgcgaacaggcggtgtatccagtgccatcgttgatcgaaggcaagtactggccgccggtggggcgtgtcgacaacgtgtttggtgaccgtaatctggtgtgtgcgtgcccgtcgatcgagagctacgcataaccaaaggatgcattgggtacaaatgtgggagggggcttgcccccgaatgcggtgcatcagccacagataagctgactgacacaccgtcatcgggggcaagccccctcccacactagatcgagtcaactttcagaaaataataagaaaccggagaacaaccatgtcccttagcgtgttcgacctgttcaagattggcattggcccctccagctcccacaccgtcggcccgatgcgtgcggccgctcgattcgtcgagggtctcaagcgtgaccacctgctgggcgccaccacctgcgtcaaggtggaactctatgggtcgctgggcgccaccggcaaaggccacggcagcgacaaagccgtactgctgggcctggaaggcgaacacccggacaccgtgaataccgaaaccgtggcaacacgcctggcgcagatgcgcaaggacggccacctgaacctgctcggtgaacaccgcattgcgttcaacgagaaagaacacctggcgatgattcgcaaacccctcgcctaccatcccaacggcatgatttttcgtgccttcgacgccgcccacatccagatccgcagccgcgagtactactcggtcggcggtggttttgtggtggacgaagacgccgccggcgccgaccggattgtcgaagacgccacgcccctgaccttcccgttcaagcacgccaaggacttgctgagccattgcaccacttacgggctgtccatcagccaggtgatgctgaccaatgaaagcgcctggcgcccggaagcggaaacccgcgccggtttgctgaaaatctggcaggtgatgcaggactgcgtggacgccggttgtcgcaacgaagggattctgcccggtggattgaaggtcaagcggcgcgcggcggccctgcatcgccagctgtgcaaaaacccggagtcggcgttgcgcgacccgctgtcggtgctcgattgggtcaacctctacgccctggcggtcaacgaagaaaacgccaacggcgggcgcgtggtcacggcgcccaccaatggtgcggccgggatcgtgccggcggtgctgcattactacatgcgttttatccctggcgcgaatgaggacggcgtagtgcgcttcctgctcaccgcggccgccatcggcattctgtacaaagaaaacgcctcgatctccggcgccgaagtcggctgccagggcgaggtcggcgtggcctgttccatggccgccggtgcgttgtgcgaagtattgggcggcagcgtgtcccaggtggaaaacgccgccgaaatcggcatggagcacaacctcggcttgacctgcgacccgatcggcggactggtgcaggtgccctgcatcgagcgtaacgccatgggctcggtcaaggcgatcaacgcagtgcgcatggccttgcgcggcgatgggcagcactttgtgtccctcgacaaggtcatccgcaccatgcgccagaccggcgccgacatgaaaagcaaatacaaggaaaccgcccgtggcggtttggcggtcaacattatcgagtgctgacgcctaaaagcgcgccagcacgtttttcaggagctgaatatgtccaccaaaaccctgttgaaaacccctctgcacgccctgcacctcgaactgggcgcacgcatggtgcccttcgccggctacgacatgccagtgcaatacccgctgggcgtgatgaaggaacacctgcacacccgtgatcaagccggcttgttcgatgtgtcccacatgggccagatccgcctcaccggtgccaacgccgccaaggccctggaaaccctggtgccggtcgacatcatcgatctgccggtgggcatgcagcgttacgcgatgttcaccaatgaccagggcggcattctcgatgacctgatggtggcgaacctgggtaacgacgaactgttcctggtggtcaatgcggcctgcaaggaccaggacctggcgcacctgcgccagcatatcggcgaccagtgcaccatcgagccgctgttcgaagagcgtgcattgctggcgctgcagggcccggcggcagtcaaggtactggcgcgcctggcaccggaagtgaccaagatgaccttcatgcaattcgcttccctgcgcctgctgggcgtggactgctatgtcagccgttcgggctacaccggtgaggacggcttcgaaatctccgtgcctgccgccaaggcggaaagcctggcgcgcagcctgctggccgagaccgaagtacaggccatcggcctgggcgcccgcgactcgttgcgcctggaagccggcctgtgcctctacggccacgacatgaataccgacaccaccccgatcgaggccagcctgttgtgggctatctcgaaggcccgccgtgccgacggtgcgcgtgccggtggctttcccggtgccgacaccatcttcacccagcagcaagccggcgtgagccgcaaacgtgtaggcctgctgccacaggagcgtacgcccgtgcgtgaaggcgcggaaattgtcgacgcagacggcaccgtgatcggcagcgtgtgcagcggcggtttcggcccgaccctcggcggcccgctggccatgggttacctggacagcgcattcatcgcactggataccgaagtctctgcgttggtgcgtgggaaaaaggtgccacttcgtgtaagtaaaatgccatttgtgccacaacgttactatcgtggctgattgactgtttctataagtaacgcgattgcgttaacgtgcactaatctgtaacgcaatcgccataaaacagtgcacttccgatagtcttttatagagggatcaacctataacaagtgaccaactctatcgaataagtcagttccacactgttcaacaaagtgtcatgagccccagcaaaacctgggcttttggcagggcttgttttttctctattagttggcgtagagtttgcccactgtgtttgcatgggtcgcttggaacctggacctgggcagtagctgaagaagtccgctacaacccgttcgacgtctcttactttcctgcaacccagcccagtactctttcatgcgaaaggggctgtcattaatttttagcgtcaaggaaataagaaaatggctgaacgtcagagcggtaccgtcaagtggtttaacgacgagaaagggtttggttttatcactccagaaagcggtccggatctgttcgtgcatttccgcgctattcagggcaacggcttcaagagcctgaaagaaggccagaaagtgacattcgttgctgtgcaaggccagaaaggcatgcaggctgacgaagtactggcagaaaaccactgagttcttctgcgacaaaaagcccctgatggtgacatcaggggcttttttatgtgcatttgctcgtaaaatggctttttttcataagagagccctgccatgtcgaaacccctgctgagcccccaaggcgaattccccgccgttggcctgggccgtcgcctggcagcgatgttctatgatttcctgctatgcaccgcactgctgatcgtcacagcgtttatctacaagctgatctggatcgcgtttgtcggtgaagccaggatgcgcaccctcaccgaatccggcgcgctggatggcgacccgttgttatcgacgattctgttgtttgtgctgtttggctttttcgccaagttctggacccattccgggcagaccctgggcatgcaggtgtggggcgtacgcgtacagaacgctgacggctcgcggatcagcctgtggcaggcgctgttgcgcttcgtggtgtcgattgcgtcgtggttgtgcgtggggctggggtttatctggtcgctgtttgataagcgcaaacgcagctggcatgacatctattcggacacgcagttggtgcggattcccaagcagaagaagtagccttctacctattggatatcaaaatgtgggagggggcttgcccccgatagcagtgnnnnnnnnnnnnnnnnnnnnnnnnnnncactgctatcgggggcaagccccctcccacattttttaccgcgttcgactatgcgttaccggcccgcttcagccgcgccgcctgggtgaaatccaacatgcgcttgagcggacgcactgcctgcgggattaccgacggttcgacgaatatctcgttactgccctcacgcagacactgcaacgtgcgttccagcgtgttcatcgccatccacgggcagtgcgcgcaactacggcacgccgcgccgttaccggcggtaggcgcttcgacgaagaccttgtccgggcacagctgctgcatcttgtaaaagatgccgcggtcggtggcgacgataaacgtcttgttcggcaggcgctgggccgccgcaatcagctggctggtagaacccacggcatccgccagttcgatcaccgaggtcggcgactccggatgcaccagaatggctgcatccgggtaaagcgccttcatgtcttccaactgcttggatttgaattcttcgtggacgatgcaggcaccgtcccacagcaacatatcggcaccggtctggcgctggatgtatgtgcccaggtgcttgtctggcccccagatgattgtctcgccgttgtccatcaggctttcgacgatttccagcgcgcagcttgacgtcaccacccaatccgcccgggctttgaccgccgccgaggtgttggcatacaccaccacggtgcgttcgggatgctggtcgcagaacgccgaaaactcatcgactgggcagcccaggtccagggagcaggtggcttccagggtgggcatgaggatgcgcttttcaggcgtgaggatcttggcagtctcgcccatgaaacgtacgccagcgaccaagactgtcttggccgggtgagcggcgccgaagcgggccatttccaaggagtcggagacacagccaccggtttcttcggccagggcctggataaccggatcacagtagaagtgggcaaccagcaccgcatcctgagccttgagctcggcggcgatggcagtgcgcaggctcgcctcttcatcggcgctgagggccttgggctgcttggcgtcgaggtgggcttgaaccagaaggcgttcggaaatttgcgtcatgttcgcaagacctgcaggcgcagttgcgcgaaagtcgagtgtaccaccggctctggagcccttcgggcaccgccggacgaagtgattgtgttcatcaagcacgggttaaggtgaagctcggcaaggctacagaatatcgaatggtttcaaaagcctaatctggtactcgcctgcgccttcgtggagcaaaaaaaaggaaaccccgcttggggtttcctgcgtttaccgccggttgttcatcaaaaacggtaagtcaccgaaccaccaaacccgttggcgctgttttcatacttcgcatcgtaggtcaggccaacctgggaaaggttctgccgcaccttgatcggctcttccttgaggtaggaatacgccacatcgaaggtcaggttatcgacgggcgtccagccggcacccaggctgaaaacggtgcggtcccccgtgggaatccgcacggagcggtcggtgttgttggtaggcgtctggtccaccgagagaccggtccgcagtacgagttctttgttgacccgataggccgcaccgatcgcgtgagaccaggtgtcatgccagtgctgctgctctgtgatggcgcccaggccaccgaattgagcagtgaggtcggagactccatcgttattgatggtgatctttttcaactgactccagcgggtataggtgctgccaaggtacaaggtccagtcgtcattcagttgatgggttaccgagaaatccaccgatgacggcgtggtcacgtccaggctggcgtcatacttctgcggcccaccgtcgaaggcatcggaaatcaagccggaggcatgggtcttgccgctgaggtggtagaccacctgcgagtggtaggtcacaccgatgcgcgtgctctcaagaggctgcatcaggagaccggcgttgaacccggtagcgttgtcgtcacctttgactttcacactttcgccggcgccgccacccagcggcacattggaatccagctcgccactgatgcggttgaaggtcgggccaaagcccaccgacactttatcgttgaaggcatagctgaccgtcggttgcacggtgatgacctggaccttgctcttgttgccaaagccattgccctggaagctgtgttcatagtcggtcaccaggccgaacggcgcgtagatgcccaggccgaatgcccagtgctcatcaatgggcgtgaccaggtagcccatcggcacggcaatgccgggcaccatatcgcccttgttggtgcctgggttgtcggcaccgaactgcgaggaactggcgtccttgatgttggatttggcatcgaggtaagtcgcaccgaggctgacttcattctgcttcagacgcgacatgccggcggggttgccgaacaccgtgctggcgtcttcggccgaggaggaacgaccggcgtagcccgtacccattgaactgatgctttgttcattgagcgcgaaaccaccggcgaacaacggggttgaggcaagggaaacggcaagcgccaaggcgcctttaagagttttgttattcattattaggactcgaattatggggcagcgatggggaagctaccaacgttcgagcgaggggtttatgaagagtttttcatgcactgaattgtcggacaattctatgcatttcaatgactttagctgttttttcgtttccagcaatgaccttttcacccgaatctgaccagccggttttaaccacggattggctatggctcagatataaaaaaccccaagcgcttcatacgcttggggcattcggtgtgttcaaacaggcaaaaaaaaacccggaaatcctcacttgcgtgggccttccggattttctaaaccgccaaaaatggtgggtcgtgtgggattcgaacctacgaccaattggttaaaagccaactgctctaccaactgagctaacgacccgctgtgtggtggcgcgtataatactgatttctaaggattattcaacaccttatttgaaataaatcagaaataacgcgttgggtcagtaattccggcggcttggaagccttctgcacgcagtcggcagctgtcgcatttcccacaagcacggccgtcatcgtctgcctggtagcaggaaacagtcagcgaataatcgacgccaagtcctacacctgccttcacaatgtcggccttgctgaggttttgcagcggcgccaggatacggaagccctgcccttctacaccggcctttgtcgccaggttggccatgcgctcgaatgactcgacgaattctgggcggcagtccgggtagccggaataatccaccgcattgactccgataaagatatcgcgggcgttgagcacttctgcccagcccagggcgagggacaggaacacggtattacgcgctggtacgtaagtcaccgggatgccttcgccgggggtttccggcacatcgatgctgctgtcagtgagggccgagccgccgatgccattgaggttcaaaccgataaccttgtgctcgaccacccccatgtcacgggcaacgcgggcagcagcgttcagctcggcgcgatggcgctggccgtagtcgaaactcatggtgtagcaggcataaccttcagcttgcgccatcgccaccacggttgccgagtccaggccaccggacagcaggattaccgcgcgtttttgatcaatcattggttcagtcatttcagcgtcctggctcgtcgttccaaaggtatttatgcagttgcaattgcagacggactggcaggttatcagccaccacccagtcggcaaggtcgcgcgcgttcagatcatggtggcttggcgagaacaatacttcgcctgcgcggcgatcaaggccgtactgaatcagcttggagttcgcccagtcgtagtcatcgcgcgaacagataacgaacttgacctgatcgttggccgtcagcaattcgatgttctcgtagcgattgcggtgcgcttccttggagccgggggtcttgagatccaccacgcggcttacacgcggatcgaccgccgagatatccagcgcgccactggtttccagggagacctcgtaaccggcgtcacacagctgcttgagtaatgggatggcattgggctgggccagcggctcaccaccggtcacgcagacgtagcgcggcttgtagccggcaacctgttccaggatgtcatcgagggtgcgcaccgtgccgccactgaaggcgtaggcgctatcgcagtactggcaacgcaaggggcaaccggtcagacgcacaaatactgtgggcaggccggccgttcgcgtttcaccctgcaacgagtaaaaaacttcggtaatacgtaatgtgtcttgcatagtcgccacgggcgtaacagctaaacaggctgtccgcctccgtcaggcactttaagggaccccgccaacgcgtagaccccaaaaagcgtgtttcataaaagggcgtggattctaacgaaaaaacccgcgccaggcgcgggtttcttctaaacgggcaaacgtcgcttacaagcgctgcagatcccgttgggccaactgggcagcggaagtccccggatactgggccaccacctgttgcagaatgcctttgaccttgtcggtatgacccaggcggcgttctacgtcagcgagtttgtacagcgagtccggcaccttggcgtgcttggggtacagctggctgaccttggcaaatgcctggcccgcgccctgtagatcaccctttgccaggttgacttcacctaaccagtactgggcgttgcccgcgtattggctgttcgggtatttgcgcaggaaagcggtaaaggcctggctggccttgtcgaaatccttggctttgatcaggtcgaaggctgcatcgtaatacagcttttccttcgccggatcacccggttcgctgctcgcggcaggggcttggctggcagccgcccctgctgctgcaccggcagcagcgctaggcgcgccaccggcagaagaattatcaggagttgcggcaggttgaacgccggctccaatacgttgatcaagatccttgtaacgctccaggccttcttgcttgagctggttcacctggttttgcagtacctcaatagcgccttgctgctgcgcgatttgatcctgcatgcgttgcagctggttgaacagttcgccctgtgccgagggagcggacgtagccgctccccccgcataggcgccgttcgtgccataacccgctggcggataactgctcccgctattgttatagccagagttgctatcttccacaggaaccgcagcccacaccgcaagcggtgcgaggctgagagccaatacagtcagagcacgacggcacgttcgcatgacgaattacttacgcagttcgacgcgacggttttgagcccaggactgctcgtcgtggccagtagcaactggacgctctttaccgtaggaaaccagttccagttggcctggagcaacaccttgcagtaccaggtagcgctgaacggctttcgcacgacgctcgcccagtgccatgttgtactcacgagtaccacgttcgtcagtgttaccttccagaacaacgcgagcgccgttagctttcaggtccttcgcgtgaacgtccagagcgcgcatggcttctggtttcaggtccgaactgtcgtattcgaagtagaaagtggtgatagcgcgcagagcagcttcttcgctcagggagccgtcaaccgcaccagtgttagcgccgtaaccagcgtttggatcaacagctgcgccttcaccggcattgtcgccgcctttagacgagcaaccaacggctacggacagagccagagccagagcagcaaacttaccaaacttcagcatttccatcgtgaaactcctaatgaaccccagtgtgttaagcaaatctttttgtagcgccgcgtcagttcaggtaaggggaccaggatggttctctgacttcgccttgtgcggtaggaagtgggagccttacgcgtccattaatggacacgagcatcaagactccccggccctgctggcgggtggcgtagattaccatggtgccgttgggcgcaacagtggctgactcatcaaggttggtatctgtaaggatttttacggttccgcgctgcaaatcctgggccgcaacccggaaattagtgaaaccatcctgacggtgaatcatcaccaacgtcttttcatcagccgaaagtttagggttggcgttgtagttaccgataaaagtaacccgttctgcaccgccaccattcacgttcgccttatagacctgtggcttgccgcctcggtcagaggtgaagtagatggtcgaaccatccttgccccagaacggttcggtattgatacccggaccgctggttgcacgagtgatctggcgcgtggccatgttcatcacgtagatgtccgggttgccgtctttggacaacacgaacgccaggcgcgaaccatccggtgaccacgctggcgcaccgttgaggccttcgaagttggtgatctgctcacgacggccagtatcaatgtgctggacgaagatacgcggacgcttctgctcgaaagacacgtaggcaatgcgcttgccgtccggcgcaaaacgcggcgacaggattggctcacgggattgcagcaaggttacagcgcgcgcaccgtcgtagtccgaacgctgcaaggtgtagcgagtgttgtccaccgagaaacgctcagccgttacgtacagcaggcgcgtcgagaaagcccccttgatgccggtgagcttttcaaacgactggtccgaaatgtagtgggccatgtcgcggatctgctcggcagtgcccgagacgctgccggtcaggacctgctgctcggtcgccacgttgaacaaggtgtaggtgatttgcaggcgaccgccggccggcgtgatgttgccgaccatcaggtactgcgcacccaccgctttccaatcacggaacacgacttcgctggcctggtttggctggctgatcatgttgccttttggaatgggcgcgtagtaaccggagttgcgcaggtcgtcactgacgatctgggccatgtcgtccggcagcacgctgccgccctgccagccgaacggtactaccgcgatcggggtggcccggtcgctaccgctggtgaccaggatgttcttttcatccgccgccgctatccctgccatacagcaaataacgacaagcattcctcgaagaaggtttctcacaaggctagatcctcaggtgtgaatgtcatcttgaatgaacgatagggagcgaagtcacttggtttcattccctgcatctcggtcaaccggccaatgttcttgactgcggcaaccgccgaactgtcgaacgaaccgtcaccactggacttggccacgctgaccgaagtcaccgtaccgtccggcaacatgccgatctgcagcactaccgtcatgcctttgcgcgccgaaggtggacgagtccagccttctgctgcccgcgcccgaatcaggtcatcgaaactgcccgcgacttcatcaccacgttcatcggccaaggcttgctgacgctgcggcgtgtcggagagcaaatctgccaaggcctgggccttcttctcttcggcggacttgcgcgctgcttcctgggcctttttcttctgggcgtcggcggcagctttcttcttcgcgtcgtcggcgacttttttcttcgcctcgtctgcttcagcttttttcttggcgtcttcggcggcttttttcttcgcgtcttcgactattttcttcttggcgtcttcagcggcctttttcttggcctcttcttcggcagccttcttggcttcttcttcagatttcttcttggctatatcagccaattgtttctcttcggcctttttcgcttcggcagctttctcggctttcttggcttcatcagcctttttcgcctcgtcagccttcttggcttcatcagcctttttcgattcctcggccttttgagccgcctcttctttcttttgttccgcagccgccttcaccgcttcctgctcgaccttcttctgttccatctgttcgacttcagtctggcgtgcagccgacttctgggcctcacctgcaatcttctgattggtctgggtggtggcctggcttttcgatttcagctgatacagggtcgcctgcacgatcggcttggctggcggcaggtccggggtcatggcaaagctgacgaacagcatgccaaacaccaggacgtgcagggcaatcgcccagacgctaggccagaagaagctttccgaggcggacggctctcgctgttgctgcatcagggcgcctcggtaatcaagccaacgttacccacgccggccttctgcagcccgcccatggcgcccatgacagagccgtagtcgaccgatttgtcgccacggatgaacacctgggtgtgcttgccgccttcgttgccggagcgaatgatcttggtcaccgcatcggtcatcgccggcaaggtgagagccttgtcttgctgcttctgcgtgtcgacttcgctgccaaggttccagtaataggtcttgtcagccttgatcgaaatggtcaggacttgagtgttgttgtcttgcggcaaggcttcactggaaaccttgggcaaatcaaccttcacgccctggttgagcatcggcgcggtcaccatgaagataaccagcagcaccagcatcacgtcgatgtaaggcactacgttcatctcggcgaccggcttgcgctttttgcgagctcgagcgattaaagccattgggaattacctgcttattcttcgctggtgtgcactttacggtgcaggatcgcctggaactcatcggcgaaggtgtagtaacggccgatcaacgtttcgctggtggcagcgaagcggttgtaggcgattactgcggggatagcggcaaacaggccgatcgccgtggcgatcaaggcttcggcgatacccggggccacggtggccagggtcgcttgctgggcctgggccaggccacggaaggagttcatgatcccccacacggtaccgaacaggccgatgtatgggctgacggaaccgacggtggcaaggaacggcaggctttgctcaagcttttcttcttcgcgggaaatggcgacgcgcatggcacgggccacaccttccatcaccgcttccgggtcaacgcctggctgctggcgcagacgggagaattccttgaagccggcgcggaagatctgctcgacgcccgaatccgggtccgggttgctgccagcctggcggtacagcttggacaggtcgatacccgaccagaagcgctcttcaaagctctccagggcacgtcgaccagcacgcagcaggttgctacgctgaaaaatcatgacccaagaggtaaccgatgcggctaccagggtcagcatgaccagttgaaccacaacactggcattgctgaccaggctccacatggaggaatggtcgacgacggtaggttccacgctaaatctcctgctttgattgtttacccgcgccgcttacgtcggcaaaggccgcacgtagagcttcgggaatggcccggggtttcaaactattggtgcgcacacaggccaccaggaactgcccctcacagagcagcgttgcatccgttgcccgcctgacctgctgcttgaaacgcaggctgacacggttcaattcgattacttcagcgctgaccaacagctcgtcgtccagccgcgccggcgcgtgataccgcgcctcgctggagtgcacgacgaataacaggtcctcgcctgccagctcggattgggcaaagcccagctcccgtagccgctcggttcgagcccgctccatgaacttgaggtagttgacgtaatacacgatgccgccggcatcggtgtcctcgtaataaacgcgacagcgatgtgcgaacgactgatccccgttttgcgcgcgcatactctagtgcttactcctcaggttgccaatccggctgggcaactgttttttcattgtctgaaacttttctaccgactgaatgacgacaccagccactaggacagcacaaacctcggataaatcgtctggcgtgaagcttttaatcgtccactgcatcgagaaattcgtctactacaggcatctcgcccaatcgtgacggaatgtttaacccaaagtgcagataggcgtggcgcgtcaccaccctgccccttggggtacgcatgatgtaaccctgctgaatcaggtacggctccagcacgtcctcaatggtatggcgctcttcactgatcgccgccgccagactatcgacacccaccggccctccgtcgaacttctcgatcatggtcaagagtagacgccgatcctggtgatcgaagccatgctcgtccacatccagcaggttcaaagccaggtcggccacggccttggtgatatgccccttggcccgcacctcggcaaaatcccgcacgcgacgcagcaaacggttggcgatccgtggcgtgccgcgggctcgacgggaaatttcaaacgcgccttccgggtccagcggcaggccgagaatattcgccgaacggctgacaatggtcgccaggtcagccgtgctatagaactctagacgttgaacaatgccgaaacggtctcgcagcgggttggtcaacatgcccgcacgggtcgtggcaccgaccagcgtgaacggcggcaggtcgagcttgatcgagcgcgccgccgggccttcgccgatcatgatgtcgagctggaagtcttccatggccgggtacagcacttcttcgacgatcggcgagagccggtggatctcgtcgataaacagcacatcgtggggttcaaggttggtcagtaatgcggccagatcccccggacgctccagcaccggaccggaggtggacttgatcgacacgcccatttcctgagcaataatattcgccagcgtggtcttgcccaaccctggcgggccgaagatcaacgtgtgatccagggactcattgcgcccgcgtgcagcctggataaacaactccatctgctcgcgcacggtgggctggccgatgtactcggccaggctcaggggccggatggcgcggtcctggacctcttcacggtcgcgcgggccggtggctgcaatcagacgatcagcttcaatcacttaaatcattcccttcagggcgcggcggatcatgtcttcactgctcaggttcttgtccttgatggccgatacggccttgctggcttcctgcggtttgtaacccagggaaatcagcgcgctgactgcatcgctctcggcactcgccacctggccggccggcatgtccggctggttcgggacgagggcaaacatgctcggtacgacttcccaggccttgaagcggtccttgagctccaccagcaggcgctcggcggtcttcttgccaacgcctggcaccttggtcagcgccgaggtgtcctgggccgaaacggcacgcaccagctcatccacttccaggctcgacatcagagccagggccagtttcggccccacgccattcaggcggatcagctcacggaagaagtcgcggtcacgcttgccaataaaaccatagagcaattgcgcatcttcgcgcaccaccaggtgggtgtgcagcgtaatcggctcaccgaccgacggtaggcgatacagggtggtcatgggtacttccagctcataccccaacccatttacatccagaatcaggtgcggcggctgtttttcagccagggtgccgcgcaagcgtccaatcacggttcagatccttaaagctagggtcagagcaaggcccgaccggaaaacgattgcgctgatgctatcagagacgcaggcgcccgccacgactgcgtgccgtgcccaggccgtggggcagcaagcttgagcgggtgtgcgcatgacaaatggcaatagccagggcgtccgaggcgtcgatctgcggcttggcggtgagcttgagcatgtgcatgaccatcatctgcacctgctctttgttggctgccccggtgccgaccacggcctgcttgacctgggtcgcagtgtattcggcgatctccatgccctcctcggcgcccgccacgatggcagcgccgcgggcctggccaagcttcaacgcggagtcggcattctttgccatgaacaccttctcgatgcccatggtcaccggcccgtaggtctggatcacttcacgcacgccgcgatagacgatctgcaggcgctcggccaactcgcccgcaccggtgcggatgcagcccgaagccacatacacgcagccacgcggggtctgttgcaccacgccaaaaccggtaatgcgcgaaccggggtcgatacctaggattaaagtcataacgcctgcgggttgggtaaacacaatttttcatacagagactaaccaatgtgggagggggcttgcccccgatggcagtgtgtcggttatctcccaaccgactgaaccaccgccatcgggggcaagccccctcccacatttaaaactacatcgcccttcagcctagctgttcggcgacagactctgggatatccgcattcgaataaacgttctgcacatcatccaggtcttcgagcatatccagcatcttcagcactttctgcgcgccatccaggtccagctcggcgctggtggtcggcagcatcacgatttccgcgtcagtacctttgaaaccggccgcttccagggcattacgcacggcgtagaagctggcgaacgaggtgaacacgtcgatggagccatcttcgttggtcaccacgtcatcggcatcggcttccatggccgcttccatcagcgcgtcttcatcggtgcccggtgcgaaagagatctgccccttgcgctcgaacaggtaggccaccgaaccgtcagtaccgaggttgccaccacatttgctgaatgcgtggcgcacggcggcggcagtacggttgcggttgtcggtcatgcactcgaccatcaccgccacaccgcccgggccatagccttcgtagctcagctcgaccatgtcgtcggtatcggccgcaccggcaccacgggccacggcacggtcgatgatgtcacgactcatgttggcacccagggccttgtccagcgccaggcgcagacgcgggttggagcctgggtcacccccaccctggcgggccgcgacggtcagctcgcggatccatttagtgaaaatcttgcctttcttggcatcctgacgctctttgcggtgcttgatgttcgcccacttggaatggccagccataacacaactccaaaaattctctagaaaccttatcaattccgccccaggcagaatgcaacccttgtaacgcaaaggcgcatccgaagatgcgcctttttagactgcgtaaacctcagtgcgctttcacgcagcagccttactcagccttcggcgtctcgcgcagacggatgtgcagctcgcgcagtgccttggcatccaccacacctggagcctgggtcatgacgtccgcagcgctctgggttttcgggaaggcgatcacttcacggatcgactgggcgccggtcatcagcatcaccagacggtccaggccgaacgccaagccaccgtgcggcggcgcgccgtatttcagggcgtcgagcaggaagccgaacttctcttcctgttccgcttcgttgatgcccaacaggcggaagaccgcttgctgcatctctttgcggtggatacggatcgaaccgccacccagttcggtgccgttgagcaccatgtcataggcccgggacagcgcgccagccgggttggcttccagctcggccggcgagcacttcggcgcggtgaacgggtggtgcaaggcgctgaagctgccgtcgtcgttctcttcgaacatcgggaagtcaacgacccacatcggagcccattcgcaggtcagcaggttcaagtcgtgacccagcttgatgcgcagtgcgcccagggcttcgctgacgatcttggccttgtcggcgccgaagaacacgatgtcaccgtcgactgcaccgacgcgatcgaggatcgcgttcaggttgtccagcggaatgtttttaacgatcggcgattgcaggccgtcaacgccattggcgcgctcgttgaccttgatgtacgccaggcccttggcaccatagatgccgacgaacttggtgtagtcgtcgatctgcttgcgcggcatgctcgcgccgcctggcacgcgcagggcggcgatgcggcatttagggtcgttggccgggccgctgaacaccttgaagtcgacttctttgagttggtcggccacgtccaccagttccagcgggttacgcaggtctggcttgtcggagccgtagcggcgcatggcttcttcgaaggtcatgtgcgggaagtcgccgaactccaggtccagcacttccttgaacaggttgcggatcatctgttcggtcaggcccatgatttctttttcatcgaggaagctggtctcgatgtcgatctgggtgaattcaggctggcggtcagcgcgcaggtcttcgtcgcggaagcacttagcgatctggtagtagcggtcgaagccggcgaccatcagcagttgcttgaacagctgaggcgattgcggcagggcgaagaacgaaccggcgtgggtacggctaggcaccaggtagtcacgcgcgccttccggggtggcccgggtcaggatcggcgtttctacgtccaggaaaccgttttcgtcaaggaaacgacggatgctggtggtcatgcgcgaacgcaggcgcagcttctcggccatttccggacgacgcaggtccaggaagcgatagcgcaggcgggtctcttcgcccacgtcagagtattcgttgagtgggaacggcggggtttccgactcgttcagcacttccagctcatagcccagcacttcgatgccgccggacgccatgttcttgttcacggcacccgccggacgcaggcgaaccttgccggtgatcttcacaacgtattcgctgcgcacgcggtcggcggcggcgaagcttgcggcgcgatccgggtcgaacaccacttgggccagaccatcacgatcacggatatcgaggaagatcaccccgccgtggtcgcggcgacggtgaacccatccgcaaagggtgatttcctgaccttccagggtctcgttcagttggccgcaataatggctgcgcatcatggtagtggtttcacttctcgtaattcgaaattcggtggaggcctgcctcgtcaccggacattaaagcaggggacggataatgcaggagcctgcgcgtagagttcaactcagtctgctttgtcgccgccggccaggttcttcttcgagccggtcttgaaatcggtctcgtaccagccattgccgctcaagcggaagcccggcatggacaacatcttcttgagttccggtgcctggcaggctgggcaatcgaccagcggcgctgcgctgatcttctgaatggcttccaactgatgaccgcaggaagcacattggtagtcgtacatgggcatggcgatgtctcggcgatcagaacgttactgcgccacgcctgccctacggatccgcagcatgcgtagcaaagcgcgggattatatccggtaaatcgaggcagcgcagccggcattctgcccggggccctgcccgccatgatagagggccggccccgaagcccggtggctataccggtgaacaggcgggttcagcacgccctttcaggacgtgcaccacacaaaccaccctgaccaacccactgaagttcttcaccccgccataacgcaagtgcacttcccgatcgacataagacagcaacgcactgactgagcaggcattgatcctggcgatttccgtgaggatattccaatagatctgctccagccgcaggcacgtggaaaatccattgagccttaccgatcgggacagcggcttggccagtcccatatcgaacccttttgcaaacgggtcgatctttatcttatgaaaaccaccggtttccatcactccattacccactccgcgtgacatacacctgacactccattgccaaacaaccgcccatgggtactcccattgggcaatggccctataaaacagcagggagcggcgggcaaccagaagacgcggagttgatcggcgtaggacaacgccaggaaatgcgcggaaacaagcgagcggcgccagggcgacgccactcaaggccagcgtttactgattttcaagcagggaacgcagcatccacgcagttttctcatgcacctgcatacgctgggtcagcaggtcagccgtcggctcatcgctgaccttgtcgagcagcgggaagataccgcgcgcggtgcgggtgaccgcttcctggccagccaccagttgcttgatcatctcttcggcgctgggcacgccttcttcttccttgatggaagaaagacgggcatagatggagtaggcacccggcgccgggaaccccagggcacggatacgctcggcaatggagtccacggccagggccagctcgttgtactgctcttcgaacatcaagtgcagcgtgcggaacatgggacccgtgacgttccaatggaagttgtgggttttcagatacagaacataggtatcggaaagcagtcgcgaaagcccgtcgacgatggatttacgatcttcttcactgataccgatatcgattgccatgtttatccccttcaattgacaagcattcattgatcaggtgcaggaccactctagcaagagtgccggtgatgcgcagcccggcgcggcaattcgccccggtgcgccctgtcgaccggcacaacccaagcctttgaggcaagtaggaaatttctctgctggccgtttgaaaaaactgcacgcgtctaggacaagcgtttgctgcagaaatgccatcgcccttgcaataccccgaaatgcttgatttgagtaggcacagcctttgctgttaaatagatggcgtgtcgccgccgttactttctgcggcagcggcataggctgataccccgcgcacgtgcccaacgcctcccattgttcagaagcgaaccgtgccagtcagctcttccttgtgatccgtcttaacgtgagttaatcaaaatgttgaaaatcgtccacctgctaacgggcgttgcagctttgctgctgtcctttatcccgagcctgcagcctgaaagcctgccgtatctggaacaacacgacgctctgtacctggccatgttcggccttcttaacctgacgctggcaccggtgatcccttactggaacaaaggcccacgtcatcaactgcaaaacctggtcagcgcgctgctggtactgaccgttgtcgtacaaaccctcaccctcctggcacccatgcctgaagtcggcggccacccggccatcctgctcagcctggtgattgctgtggtcgccatcgttcttcacctggccatcagcttctaccgttcgtcccctgcggcctcgtcgcaaacctacgacatgaccaatcgggataccggtaccgtcaagtggttcaacacatccaaaggcttcggctttatttcccgtgattcgggcgacgatatcttcgtccacttccgggccattcgcggcgaaggccatcgcgtcctggtggaaggccagcgcgtggagttctccgtgatgaatcgcgacaaaggcctgcaggccgaagacgtgatcgctgcactgccgcgtcgctgataccggctttcgcagcaaaaaaaaccgcgatccagcttggctgggtcgcggtttttttatgcgcggctattaatagtgaggcggcggcgcttcttcttcggaggtttcgaactggccgcccatttcttcctggcgtttgagcagcgcagtcatctgcagttgcaggcgttctaccgcacgctgctgggtgacgaggatgtcattgagggtctcgatggtgtcgtcctggaaggccaggcggctttccaagtcggtgacgcggtcttgcagatccatgattcagccctggttaaatatgaagtcggcgggcaacagctcgcgcagacgggcgcggatggcagcgacttgctcatcggtgtaaggctgcgccggatgtttgccccataccggcgccggccaggcagcatcgtcgcgcttgcgcacgatcacatgcacgtgcaactggctgaccacattgcccagggcgccgatgttcatcttgtcggcggccaagccttcattcagcaactgggccaaggccgtcgtctcttgccacaaacgctgctggtcggcgacatccagttgaaacacttcgctgatagcgttgatgcgtggcaccaggatgaaccacgggtagttcgagtcattggacagcagcaggcggcacagcgggaagtccccgatgaccagtgtgtcttgttgtaggcgttgatctagggcgaacaccgcgggcactccgttcggcaagtcaggttcaggcgcccagcataccttcgaatgcgcccggcttcacggcgaatgcaggaaagcgccggcgccaatgatgaaaaagcatgcactctttcgaggcgggcgaatatttgagctacgctaaaccgggcctcaccgggacgcaccaaaatgacccacttgtgcttcaaagggatccgccaattacccactcatgggggtgaaccggtaacgtttttccctcgcacaggttttatgcaccaccgaagaggggtaacaccgccgcgtcaagcccaaaccaaacggcgtaaaaagcccgtgcttatgcggtttttacacgcccgcaagggttttcacgaaaaaatgacattcggttaccgctttgtgcacgcttgttgcattgacacctgcatcgtcggcaacgacacctgaatggaagcaggtgtttcgcgaaaaaaaaacagcagcgtttcaatgcgtatcaaggaagtgttcaaactttgaaaagggtttggaaacagtattgaagttgtcagtccggttacaacaggactgtgaatttgcgacatggagctagcaatttacgacagcctcgtaaagaagctgaaaggatagatgggtaagtatcgtcaatagggtctgcgtgatataactttgcgccgacacataaaagaaagagccgcccagataaaaatacaggtgggacggcagtactcttcctaaaaccaaaggagcaaatcacgatgcgcgtgatgaagtggagcatgatcgccctggctgtttcagcaggcactacgcagttcgcaatggcgtccgcccaaagcgattccaaaggctttgttgaagacagcactttcagcattaatactcgcgctctgtacttcagccgcgacttccgcaacaacccgtcgggcccaggctcccagagccgtgccgaagaaaccggcctgggcttcaatgccctgtacgaatcgggcttcactcaaggcaccatcggtgtcggtgttgatgtgattggcctgttgggcgtcaagctcgacagcggcaagggccgtgcgggtaccggtctattcccaacgggttccgacggtcgctcgcaagacgactactccaaaggcggcggtgccgttaagttccgtatctccaatacggtcctgaaagtcggtgaccagtacactacggctcctgtgttcgcctctgacgacagccgtttgctgccagagctgccacaaggtatctcgatcaccagtaacgagatcaagggcctgaaactggaaggcggtcacttcacttccagcattgcgcagaaccagacctatcacgacagccttggcttgaccaaaaccgattttgtcggtggtgtctactcgttcacgcctgagttcaccggcagcctgtactacgcgaagaccgaagattacttccgcaagtactacagcaacctgaactggacccacgcactgagcgacgaccagtctttcgccttggacttcaacatctacgacaccaagagcgagggcgaaggcctgcaacgtgcttccaaagacagcgctctgccgttcgcacaacgcaccaagctcgacaaccgtgcgttcagcttgcagggtgcttacaccatcggtgctcacacctttactctggccgcccagaaagtcaccggcgacggcgactacggctacggcgtagacggcggcggcacggtattcctggccaactccatcgcccgttccgacttcaacgccgaaggcgagaagtcctaccaggctcggtacgatatcaacatggcgacctttggcattcctggccttagcttcatgactcgttatgtcaccggtagcggcgccaacactgccaccacttcgaacggtaaagagtgggaacgtgatatcgaagccaagtacgtggtacagagcggcccagcgaaaaacctgagcctgcgtctgcgtcaagccacctatcgttcgggtgatggcgtttactacggttcgccttcgatcgacgaactgcgtctgatcgcgaactacccgctgaacatcttgtaactgctcgttcgattacaacgatggcttaaggcttcggccttaaataaaaagccgccccccttgcaaacaagagggggcggcttttttattaccgtttaatttcaatcgaaaaataactagcaagctaactaacgagattaacccgtcgaccgtgaacctgaccttttggccaagttcaatgccattgaccttagttacttcgtaacactttcctgcatcacccgaataacccgctgcggaaatggaatatcaatccccgccgcttttaaacggtcacgtgccagttcgttcaacatgaacaccacatcccaataatccgcggtcttggtccagcaacgcagggaaacggtgatcgaactgtcacccaaagtcgaaaccaccgccacggcagccggatcggccagtacacgtggatcttttgccagctccagcagcacttcacgggctttctgcaggtcagcttcatagtccacacccacatcaaacaccaccttgcgggtcggctgacggttggtgttggtgattaggccgttggacaggctgccgttagggatgatcacggtcttgttgtcgccggtgcgcagcacggtatggaagatctggatgctgtcgacggtacccgaggtgccttgggcttcgatccagtcaccaatgcggaacgggcggaacagcagaatcagcacgccgccggcgaagttcgccaggctgccttgcaaagccaggccaatggccagggtcgcggcaccaattgcggccacgaacgaggtggttgccacgccgatcatcgaggccacgttgaccaccagcatgactttgagcgcgatgttcgccaggctggtgatgaagtgttgcagggccaggtcagcattgcgcagtgccagcaaacggcccactcgatgggtcaacacgttgatcagccaccaaccgatggccagggtgaccactgccagcaaaaaccggctgccgtattccatgatcatcggcagccacgactctgaggtcttgatcaagtgatccacttcagcattgaaatccatctacattctcctggttaccggatgttcggcgtatcgagtggccataaatgcaattgagccccgaagggctcaatagtaggcgcaggttgtggggcgtgggacgtcaaaaacgcccgcaggttccccaatgtgccatcagtcgcggaagttattgaactgcagcggcatgtcgaaggtcttggcgcgcagggccgcgatggcttcttgcaggtcgtcacgcttcttgccggtgacgcgaacctgctcaccctggatcgcggcctggactttcagcttggcgtccttgatgtgggcgacgattttcttcgccagctccttgtcgatgccttccttgaggatggcttcctgcttcatcagcttgccggaggcgtaggcgtccttgatttcaaggcattgcgcgtcgatcttgcgcttgaccagcgacagcttgaggatctcgatcatcgcttccagctggaaatcggcttcagcggtcaggttgacggtcagctctttttccttgaactcgaagctgcccttgcctttcaagtcatagcgacggtccagctccttgacggcgttttcgacggcgttggtgacttcgtgtttgtccagttcggataccacgtcgaacgaaggcatgtcatatctccaatataaggggcgggctcagtagagatggagcgcgcccaagctaaaatgccggggcattatagcggttcttttgtcccgttcgctgcgggcgaccctacggagcaaaaactgatgtcgaccacctggcatattctcggcgccggcagcctgggcacactttgggcgactcgcctggcgcgtgctggcgtgcccgtgcggttgatcctgcgcgatgaagcgcgcctggccaactatcagacagccaaggggctgaccttggtggaacaaggtgtagaacacacttacccggtgacaggcgaaacatccgacagtcctgggctgattcatcgcctgctggtggcgtgcaaagcctacgacgctcaagcagccgtcgcacagttgcaacatcgactggcgcccgatgccgaactgatcctgctgcagaacggcctcggcagccaggacgcagtcgccgcgcaactgccccaggcccgctgcatcttcgcctccagcaccgaaggcgcgtttcgcgacggcgactggcgcgtggtgttcgccggccatggctacacctggctgggcgatgcaggccacccaaccccgccgctgtggctggaggatttgcaagccgccggcatcccccacgactggagcaccgatatcctcacgcggctctggcgcaagctggcgctcaattgcgccatcaacccgctgaccgtgctgtatcagtgccgcaatggcgagctacaggcccaccagtgcgaagtcgccaccctgtgcgccgaactcggcgaactgctggaatgctgtggccagcccgccgccgcgctggacctgcaacacgaggtggaacgggtgatccaggccaccgccgccaactactcctccatgtaccaggacgtggccgcaggccgccgcaccgaaatcagctacctattgggctatgcttgccaggcggccgcccgtcaccaactgaacctgccgcaccttcaacagctgcaagtgcgcctggtcgagcagttgcttgcacgcggattgccccgcgactgagccacgcgctaccctgcccgcctgtctatcacctgggaaaaccctgatgccgctgcgccagcgtcttgaaaacctaccggtcgggcagaaactgctggccgccctgctggtgctgttgaccaccgtactgctggtggccaacctgacctttatcagcgccgcctactggatctcccaggaaagcatggcgccccaggccttgcaggccatcggccgcctggtgtccaaccctgcgctcgccgccgaggccctcgaatcgccggccaaggccgacgcattgctcaatgagttgaccagctattcgccgttgcgcgccgccgctctgtacgacggcgacggcaaccgcctggcgcagatgcaacacggcgaccgcctgcacctgcccgatgactaccggcacatcgaggcctggcgtgtcaccgagtttcgcagcaaccaggtcatcaccctgccccgcgccggccaaccgtccgggcatttgctgctggtggccagcagtgagctaccagtggcgttctacaccggcacattgactgccagcctgggcatcctgattttcagcgtactgttgtggctggtcatcgcccgtcagatcaaacgcctgatcacgcggccgatccacgaactggaagaactgtcgcgccaggtcactcgcgaagagaactacgccctgcgcgccggtcgtggcaaccacgatgaaataggcagcctggccgaagccttcaacacaatgctgtcgcgcatcgaagcccgcgagcaacagctcaagcgcgcacgggacgactcccaggcggcctacgaccaggcccagggcctggccgaagagacgcgccacaccaaccgcaagctggaactggaagtccaggtccgtagcaagatcgagaagaaactcaccggtttccagaattacctgaacagcatcatcgactcgatgccctcggcattgatcgccctggatgaacagctctacgtcacccaatggaaccaggaagccagcgccctctccggcacacgcttggatgaagctttgaaccagccgatctacctggccttccagccgctcaagccttacttgccgcagatcagggcagcggtcgaacaacacacggtggagcgcatcgaacgcgtcaactggttcaaggatgacgaacccaaacactacgccctgaccttctacccgctgatgggcggtgccggacgtggcgtggtaatccgtatcgatgacatcacccagcgcctgtccctggaagaaatgatggtgcagtcggagaagatgctttccgtcggcggcctggccgccggcatggcccacgagatcaacaacccgctgggggcgatcctgcataacgtgcagaacatccgccgccgcttgtcgcctgacttgccgaagaacctggaacacgcggaacaggtgggtatcgagttggagaccgtcaaccgctacctgcaaagccgcgaagtgccgcaactgctcgatggcatccagcaggccggggcgcgggcggcgaagatcgtcacccatatgctcagtttcagtcgccgcagcaaccgacagatggcaccttgcgacttgccggcattgatcgaccaggcggtggagattgccggtaacgatttcgacctggccatcggctttgacttcaagggccaggcgatcatccgccagttcgacccgcaactgggtccggtgccaggcaccgccaacgaactcgaacaggtcctgctcaacctgctgaaaaacgcggcccaggccattcacctgcgggaagacgacagcgaaccggggcgcatcatcctgcgtacgcgcctcaacccgccgtgggcggagatccaggtggaagacaacggcatcggcatgagtgaaaacgtgcgcaaacgcaccttcgagccgttcttcaccaccaaggaaatcggccagggcaccgggctagggctgtcggtgtcgtatttcatcatcaccaataaccacaagggccagatggaagtgcactccaccctcggccagggcacctgctttaccttgcgcttacccctggccggcagccaactgccgccttacgaactcacccaactggagcaatgaccatgggctttcgcctgtcgaagatctacacccgtaccggcgacaaaggcgaaaccggcctgggcgacggccgccgtgtgcccaaggatcacccacgggtggaggccatcggtgaggtggatacgctgaacagccagttgggattgttactggccaatcttgaagaacagagcggcaaacatccggaactgaaggatgtgatcgaggtgcttacgccgtgccagcatcgcttgttcgacctggggggcgagttggcgatgccagtgtacaaggcgctgaatgcggcggaagtggatcggctggaagcagcaattgatcgctggaatgaagaagtgggatcgctagagaacttcatcctgcccggtggctcggcgttgatcgcccaggcccacgtgtgccgcagcctcgcgcgcagtgcagagcggcggtgccagcagttgaatgcggtcgagccgttggaaggcgtggggttggcgtacatcaatcggttatcggacttgttgtttgtggcggcgcgggtaattgcaaggcgccagggcgttgctgaggttttatggcaggctgccgctaaaccccactgattattcagcgcctgatctgacgccttcgcgagcaagcccgctcccacatttgaccgcattccaacggtagaactcggtcgaatgtgggagggggcttgcccccgataaggccggtcagaacagcctcaaatctcaggccagaacgcgcgaatccctgccacaccttgggccccagcctcccaagccttctcccgctcggcgggtccaaccccgcccaacagaaacaccggcttgctgaacccggcgatcaacgccgctacctgctcccagcccaacggctgcgcatcaggatgggtctgggtcggctgcaccggcgacagcgtgacaaaatccacgtccatcatttctgccagtgccaactcctcagcgttatggcaggaagcagccagccagcgatccttcggcagcggacgccccttgctggcgtacttacgcagttgcgccgaggtcatgtgccaaccggccgcaggaaaatcccccagccattcaaacggccccttgagcatcaactgggccttgcccgcgcacaggcccaccgcatccaccgcaaggtcgcggtatttggggtcgtagccgttgggcgcacgcagttgtaccaacttgatgccgccagcaatggctttctggataccccgcagtaacgtcggggtttccagttcgcccggggtgatcaggtactcggcaggcaagcgcgcagccgcaacgatcggcgcgttggccgccgggaactcgtagttgagcagctcccgaggcgccacccattccagcggttgcccttcggcgccatggggctcaccggtaaacgccgagacttcccagacatccagcaacacctgtttgtccggatagtcatgctgcaccttgatcagcggccgcgccgtggtgacctcgatgcccagctcttcctgcaattcgcgggacagcgcgccggcgaccgattcatcggcttccaccttgcccccggggaattcccagaggccgccctggtgctgggtatcggcgcggcgcgccagcaggattttgccgtcgacaccgcggatcaccgctgctgctacatgcactcgtttcaccgcgcttatcctcttaggtacggtattccgcgttgatcttcacgtactcgtgggacaggtcggtggtccagatggtttcgctgcactcgccgcgacccaactcgatacggatggtgatttcttcctgctgcatcaccgccgaaccctgggcttcggtgtaggtttcggcacgggcgccacggctggcgatgcacacgtcgccgaggaacacgtcgatcttgctcacatccaggtctggcacaccggcacgaccaacggccgccaggatacggccccagttcgggtcagaggcgaacagcgcagtcttgatcagtggcgagtgagccacggtgtaacccacgtccaggcattcctggtggttgccgccgccgttgacttcaaccgtgacgaacttggtggcaccctcgccgtcacgcacgatggcctgggccacgtccatgcacacttcgaataccgcctgcttcaacgcggcgaacaacgggccgctggcctcggtgatttccggcaggttggcctggccggtagcgatcagcatgcagcagtcgttggtcgaggtgtcgccatcgatggtgatgcggttgaacgacttgttggcaccgtccaggatcaggctgtgcagcacgtcgcgggagactttggcatcggtagcgatgtagccgagcatggtggccatgttcggacggatcatgcccgcgcccttgctgataccggtcacggtgacagtcacgccatcgtgcacgaactggcggcttgcgccttttggcagggtgtcggtggtcatgatgccggtggcggcggcggcccagttatccacagacaggtcgtccagcgcggcttgcagcgcgccttcgattttctcgaccggcaacggctcaccgatcacaccggtggaatacggcaggacctggctggcgtccacgccggtcagttgggccagcttggcgcaggtgcgcgcagccgccaccaggccaggctcgccggtgccggcattggcgttgccggtgttggtcagcaggtagcggatcgtaccggccacgcgttgcttggccagaatcaccggcgcagcgcagaacgcgttgagggtaaacacaccggcgacggtcgagccttcggcgcaacgcatcacgactacatccttgcgcccagggcgcttgatgccggccgaagcgataccgagttcaaaaccggcaaccgggtgcaacgtgggcaaaggaccaagaccaacagccatgaatgcgctccttaaaaatgggtgatgtctgtgccgtcgtgagcgacggtgaaattaatggcaaaacgccgcgacggcaggagccggtcgcggcgcagggtgttgcagcgtcaggcgaaaatcttattcgatctggccgtggcagtgtttgaacttcttgcccgagccgcaatagcacagctcgttgcggcccagcttctgttcgttgcgcaccgggctttgagccagggccacatcgacctcctcacccaatacctcaggcgcttccaggcctggcgcttcgtcgtgctggaactgcatgcgcgcagccagtgcctcggcttcctgacgcaggcgagcttcttcctcgatcgggtcttcgcgacgcacctgaacgtgggacagcacgcggatggaatcgcgcttgatcgaatccagcagctcggagaacagcgtgaacgactcgcgcttgtactcctgcttcgggttcttctgggcgtaaccccgcaggtggatgccgtgacgcaggtggtccatggtcgacaggtggtctttccacaggtcgtccagcacgcgcagaacgatttgcttctcgaaggtgcgcagtgcttcggcactcgcctgctcttctttctcgttgtacgcggccagcaattcggccatcagtttttcacgcagggtttcttcgtacaggtggtcgtcttcgtccagccactgctggactggcaagtcgacaccgaagtcgctcttcaacgccgcttccaggccggcaacatcccactgctctggcaaggactgtggcggaatgtgtgcgctgacggtggcgttgagcacgtcctgacggaagtcggcgatggtctcgccaatgttgtcggcggccagcaacgtgttacgcatgtgatagatcactttacgctgttcgttgttgacgtcatcgaactcgagcagttgcttacgaatatcgaagttgcggccttcaaccttgcgctgggccttctcgatggcgttggtcaccatgcggtgctcgatcgcttcgccggactgcatgcccagggccttcatgaagttcttcacgcggtccgaagcgaagatgcgcatcaggctgtcttccagggacaggtagaagcggctggaaccggcgtcaccctggcgaccggcacggccacgcagctggttgtcgatacgacgcgattcatgacgctcggaggcgatcacctgcaggccaccggattccagcacggcctggtgacgcttctgccaatcggccttgatctgggcgatctgctcagggctcgggttttccagggccgcgacttccacttcccagttgccgcccaacaggatgtcggtaccacgaccggccatgttggtggcgatggtcagtgcgccagggcgaccggcctgggcgatgatctcggcttctttttcgtggaacttggcgttgaggaccttgtgctcgatgccttccttattaagcaggttggacacgtgctcggaagtctcgatggtagcggtgcccaccaggatcggacggccctgggccataccgtccttgatgtcgttgatgattgccgcgtatttctcttcggccgtcaggaacaccaggtcattgaagtctttacgcgccaaaggcttgttcggcggaatgaccatcacagacaggccgtagatctggtggaattcgaacgcttcagtgtcggccgtaccggtcatcccggacagtttgttgtacagacggaagtagttctggaaggtggtggacgccaacgtctggctttcagcctggatgttgaggtgctccttcgcttcgatggcctggtgcaggccctcggacagacggcggcccggcatggtacgaccggtgtgctcgtcgaccagcacgacctggccgtcctgcacgatgtactcgacgttgcgatggaacagcttgtgggcacgcaggccggcatacacgtgggtcaacaggcccaggttgtgcgccgagtacaggctttcaccctcggccaattcgccgatctgggtcagcatctcttcgacgaactggtgaccggcttcgttgagttcgacctggcgggtcttctcgtcgatgctgaagtgaccttctttggtcaccacgccttcgacttcctcgatgtgctgctccagacgcggaatcaacttgttgatttcggtgtacaggcgcgagctgtcttcggcctggccggagatgatcagcggggtacgggcttcgtcgatgaggatggagtcgacttcgtcgatcacggcaaagttgagttcgcgctggaatttttcatccatgctgaacgccatgttgtcgcgcaggtagtcgaaaccgaattcgttgttggtgccgtaggtaatgtcgcacgcgtaggcagcgcgcttctcttccggcggctggaatggcgtaacgacgccaacggtcaggccgaggaattcatagagcgggcgcatccagttagcgtcgcggcgggccaggtagtcgttcaccgtcaccacgtgcacgcccttgccggacaatgcgttgaggtaaacgcccagggttgccaccagggtcttgccttcaccggtacgcatttcggcaatcatgccttcatgcaaggtcatgccgccgatcaactggacgtcgaagtggcgcatgcccatgacacgcttaccggcttcacgggcgaccgcaaaggcttcgggaagcagcttgtcgagggtttcacctttggctatgcgggccttgaactcttgggtcttggcgcgcaattgctcgtccgaaagggcaaccatctgctcttcgaaggcattgaccagctgcaccgtcttgagcatgcgtttgacttcgcgctcattcttgcttccaaaaagtttctttaacaaaggcgcaaacatatcggcaggttcttccacacatagggatggagggcgcaccgtgagtggcccgagcagccctcacggccgcatgcgaacgcgcattctacccggaatcgtgggtgaggaaagtggcgttattccccgatgctggcatggtgctgtgagagggcctgtttaaaataagggcttttaccggaacttcaacccatggagcgcagaagttaccgattgatttcacgcacaaaagcccatggatgctttgcctggggagatgcagacgctttctgctaagatggcggctctgttacttaaggtgtccaacaatggcatttcgcccctcgccagcccgcgcgcctgccgtgttgcttcgcgatgccaagccgctgaaagccatctttggccatgcgcaacgcctgggccatctgcaacgcctgctcgaaagccaactgcaaccggccgcgcgcgaacactgccgcgtggcgtcctggcgtgaaggcaacctgctgctaattgtcacagatggccactgggcgacacgtctgcgttatcagcaaaaacgcctgcaacgtcaattgatagcgtttgatgaattcgccggtttgacgcgcattcagttcaaggtacaaccgcccaccaccctgcctggcgtggtgcagcacactcatgacctctcgacgaatgccgccgaaaccattcaggcaacggccgacgggatcagcaacccggccttgcgcgcagcccttgagcgactggcagcccacgccaggcccaagccctgagtctctatttgcgcttgctgccgcccagtaacgaccccaacaaaccacgtaccagttgccgccccatctgattggcggcctgctgcatcgccgatttcagcgccttgcctgccgtggtgcccagaaacgcaccggccctgtcggtaaaactcggctcgtcggtagtcggcttggtctcttcggtcgggccaagctccttgcgtgacatcagcacttcgtaagcggattcccgatcaatcggcttgtcataacggccttgcagcggcgaactggcgaccaacgcggcgcgttcggcttcgctgagcggcccgatgcgtgattgcggcggagcaaccaaaacgcgatggacgacttccggcgtgcctttttcctgcaaggtgcccaccaacgcctcacccgtgcccagctcggtcagtaccgacaaggcatcgaatgctggattgggccgaaacccctccgcgacggcacgcagggatttctgttccttggtggtgaacgcccgcaagccatgctggatacgcagaccgagctgggccagcacgctgtccggcaggtcgcccggcgattgagtgacaaaatacacaccgacgcctttggagcgaatcagccgcaccacctgttccaggcgctcctgcaaggccttgggcgtatcggcgaacaacaaatgtgcctcatcaaaaaacagcgccagcagcggtttttcggcatcaccacgctcgggcagttgctcgaacaactccgccaacagccacagcaggaacgtcgcgtataccttcggtgcctcgtgcaccagacggctggcgtccagcagatggatgcgcccgcgtccatcaccagtgggctgcaggatatcttccaactgcagggccggctcaccaaacaaggcttcagccccctgttgttccagcaccgccaggcgccgcaagagggcctggctggatccggtggtcatcagcgctgcgtcttcgcccagcaattccgggtgatagcgcaggtggttaagcagtgccttgaggtccttgaggtccagcagcagcaagccttcgcgatccgccaccttgaacgccgcgtaaagcgctgactgctggctgtcagtaagttccaacaggctaccgagcaacaacgggcccatttcgctgatggtggtgcgcaatggatggccggactgcccgtggatatcccacagcgtgaccggataagccttggccgtgtaattcaggaaaggcatgccggcgatgcgctcggcgaccttgccttgcggattcgccgcagcgccgagcccgcataggtcccccttgatgtccgcggcaaacaccgccacgccggcgtcactgaaggcttccgccaggcgttgcaatgtaacggtcttgcccgtgccggtggcaccggcgatcaacccgtggcgattggccaaccgcatggcctgggcgatgggctggccggaaaggtcggcaccgataagcagttgcgaggagtcaggcatttcgtcacccatggttaatctttagtgtcgccaagtcgatacaggcagatgtaagacccacaaagtctaaaaataggtcagatagttcctacagggaccaccggagctatcacaagaagtatcacaccttttttgacgctgtcattttgcgcatcccacaaggacgcgctttggatattaagaccttagcggaccctacaagccatgaataaaaatctgcgcttcagccacaaaatcctgcttgcagcctcccttatcgtcatcgcggctttcgcgctgtttaccctttacaacgactacctgcaacgcaacgccattcgcgacgacctcaacaattacctgcatgaaatgggcgacgtcaccgccagcaatattcaaacctggctcaccgggcgcattgccctggtggagaacgccgcacaaaacatcgccatcaaccccgagccttccgcagttgccagcctgctggagcagaaaaccctgacgtcctcattcatggcgacctacgtcggtgacagccagggcgcctttaccatccgccccgacaccaagatgccggacggcttcgacccgcgtgtgcggccctggtacaagggcgcccagagcagcaacggctcaaccctgaccgaaccctatatcgatgccgccaccggcaagttgatcatttccgttgccacccccagcacccggggtactcagagcatcggcgtagtgggcggcgacctgagcctgcaaaccctggtggataacattggcgcgctgaacttcggcggcatgggctatgcgtttctggtcagcgccgatggcagagtattggtacatccggataaaaacctggtgatgaagaccctggccgatgtgtatccgaaaaatacgccaaaaatcagcgccgatttcagcgaagtcgaggccaacggcaaggccaacatcgtgaccttcataccgatcaagggcctgccttcggtgaactggtacctcggtatttcagtagataaagacaaatccttcgccatgctcagcgagttccgcacctcggcggtcatcgccacggtgattgcggtggtgatcatcatcgccctgctgggcatgctgatccgcgtattaatgcaacctttgcacgtgatgacccgcgccatgcaggacatcgccgatggcgagggggacctgacgcgccgcctgaccatccagaatcacgatgaattcggcacgctgggtaacgccttcaaccgcttcgtggagcgcattcacacatcgatcagcgaagtgtcctcagccaccgaacaggtgaatgaggtagcactacgggtggtcagcgcgtccaactcgtcgatggtcaactccgacgagcaggccaaccgtaccaacagtgtcgccgccgccatcaatgaattgggcgccgccgcccaggaaattgcgcgcaatgccgcgcaagcctcccatcaggccagcgatgcccggcacctggctgaggacggccagcaagtggtcgagcgcaatatcaaggcgatgaatcagctttcagcgatgatcagcgcgtccagcagcaatatcgaagcgcttaacagcaagacggtgaacatcggccagattctcgaagtgatcaccagcatttcccagcaaaccaacctgctggcactgaacgccgccattgaagcggcgcgtgccggggaagcgggccgtgggtttgcggtggttgccgatgaagtgcgcaacttggcgcatcgcacgcaggagtccgcgcagcaagtgcagaagatgatcgaggagctgcaagtcggcgcccgggattcggtcagcaccatgagtgaaagccagcgccacagcctcgacagcgtggacatcgccaacctggccggcgagcgcctgaacagcgtgacccagcgcatcggcgagatcgacggcatgaaccagtcggtcgccactgccacggaagaacagacttcagtggtggagtcgatcaacatggacattaccgagatcaacaccctcaatcaggaaggggtggaaaacctgcaatccacgctgcgagcgtgtgccgaccttgagcaacaagcggcacggttgaagcagttggtcggtagtttccggatctgatcaggagtcctcaggctcggacttggcctgctcttgctcccacaactcggcggcaccgggaaattcggtgccgtcctcgctgctcaggtcatccgggtcatatcggctcaaacagccctcccctaaggttgccggggcttttgacgtggctttgtccaacggatcattcatcgctcaatcctcaagggcacgcaaagaaaaagggcccggaacgatttaacgcccaggcccttcattcttcaatcacaacaggtcggtcagaacaccaccgtcttgttgccgtgcaccagcacgcggtcttccaggtggtagcgcaggccacgggccaggaccatcttctcgacgtcgcggccgaaacgcaccatgtcttcaatgctgtcgctgtggctgacacgcaccacgtcctgctcgatgatcgggccggcgtccagctcttcggtgacgtagtggcaagtcgcgccgatcaacttcacaccccgcagggaagcctggtgatacggcttggcccctacgaacgacggcaggaagctgtggtgaatgttgatcaccttgccggcgtattcgcggcacagttccggcggcaggatttgcatgtagcgcgccagcaccacaacgtcagcctcgtgttgcttgaccaggcgggagacctcggcgaacgccggctccttgtcctgcgggttgaccggcacgtggtaatacgggatgccgtgccactcgaccatgctgcgcaggtcgtcatggttggaaatcacgcaagcgatctcgcagtccagctcatcgctgtgccagcggtgcagcaaatcggccaggcagtgggattcgcggctggccatcaacaccacgcgctttttctgctcggtgtcggtgatgtgccaggtcatcgaaaactcttcagcgatcggcgcaaacgcttcacggaaggcatcaagaccaaaaggcagcgaatcggcacgaatctcgtgacgcatgaagaaccaaccgctgagattgtccgagtgatgactcgcttcggtaatccagccgttgtgggaggccagaaagttactgactttggcaacgatgccgacccggtccgggcaagcaatcaccagccgaaaagtgcgcattagggggaaactccagaacttcgcaaaggccgccattctagcgattgcgcaggaaaactgcagtattcgttaacgtttattctgatcgccggccccagctttgtcccttaatagcctatggttttaccacccttatatgaatctgtgcggcataccacggctgttcccgcttttccaagcagattatctttgggtctacgccctagtaattaactcgaatgcatagcattgctacaaacattcaaagtaattcacataaatgcgagcttaaatgtttacttgaggaaaccgcctgactattattgggccactatccctgtcaatcagcgctctacataaggtagtccacatgtctctgatcaacgaataccgtgccaccgaagaagctatcaaagagctgcaagcccgtttgaagaacctgtcccaagacgacaaactgcaaaccgagctggaattcgaaggtaaattgcgtgccctgatgggtgaatactccaaatccctgcgtgacatcatcgcgctgctggatccagagtcgaaagttaaagctccacgcggcgccgtaaaaactaccggtaccaagcgtgcccgcaaagtcaaacagtacaaaaacccgcacaacggcgaagtgattgaaaccaaaggtggcaaccacaaaacgctgaaagagtggaaagccaagtggggcggtgacgtggttgaaggttgggctaccctgctgggctaagcctcatcaggtttgcgcctgacccgtgacacattaaaaacgccagcttgctggcgttttttattgtccgcatagtctgcgaaaaccgactacagattcattctggtcgctagagcgtccgcatactcctgccattggtccagcacctgagactggaacggtgtagcactaacagcaaactcaagccgagcctgtttaaacgcatcaagggtattcggcgcgccccattccgggctcgacaaacgttgctgacagaaaagtttccagcgcagttgctcctcgctgttcaacgtatcggggaagttgcgcgctcggtagcggaataataattcaggcaaacgctcgtcatcaaaaggccactgctggcgcgctaattgcgcaggctcagcggtccggacttgttcacataaacgccggtcacggtctccgataaaaccgccgtaaagctgttgctcaggatccgaactcggcgtgaagtcttcgtgcgcgtaaatggccgccaacttatcgcgccaaagttcctgtgcgtcagttagccgcagcgcccgttcctgaaaaatattcatgtccaagtgcagacgctcacgatcttctgcgcgcagcacattcaagggcgccaccacggggcagcggttgatatgcaccaatttgagggggaccggcaattcaccgtcggcgagatcatcacgacgggtatagaggcgctggcgcaaggcctcggcatcaaggtccagcagcccctgcggatcgagtccgaggtcacagacgatcaatgcattgcgattacgcggatgccatgcgagcggcagcacaacacccaggtaatgacgttcggcagaaaaacgcccggaaatatgcaccattggctgcagcagacgcacctggtccattacccgttgcttgctgcgcagctgaaacagccattcatacaacttgggctgtttctcacgtaccagccgagccaacgcaatcgtggcacgcacatcggacaacgcatcgtgcgcctgaccatggtcgatcccattggcttcggtcagacgctccagcttgagcgtgacgcgcccatcctgctgcggccattcaatgccctccgggcgcagggcgtaggccgtgcggaccacgtcgatcaaatcccagcgactgttaccgccctgccattctcgtgcgtaggggtcgaaaaaattgcgatagaggctgtagcgcgtcatctcgtcatcaaaccgcagcgtgttgtaaccggcaccgcacgtaccgggggcggccagttcagtgtgcacccgagtcatgaagtcggcctcggccaagcctttttccgcgagtattacgggcgtgataccagtgatcgcacacgcgatggggtgcggcaggatatcgtcgctgggctggcaatagagattgaccggcgagccgatctcgttgagttcgaggtcggtacgaatgccggctacctgaagcgggcgatcgctgcgcggattgatgccggtggtttcatagtcgtaccagaaaatggaggtcacgggttgttcctgtactgaagatcgacaaagtctaggcgctgaaaggcttccgcgaccagcaccaaatacactgtacaaacatccagcaaactcttgaatggttgcttccatccccgacactgctagcatccgtgtcttccagccactctgcactgccaaggatcgcgatgccgtcagccccattggacacccgctaccagatcgagaccccggagggcatcgacctgcccctgcgtccggccggcctggtgccgcgcgtgctcgcctttgccttcgacctgggtgtacgcggggtgatcatgggcgttctgttggtgccattggctttgcttggcaacgtcgggatcggcctgggagcgctgctgctgtttttgatcagttggtggtacatggtgctgttcgaggtgctcaaccagggttgctcacccggcaagcaggttatggggctgcgtgtcgtacaagatgacggcactccgattggctggtccgcttcactgattcgtaacctgctgcggtttgtggacatgctgccgttcggctactgccttggcgcgatcagttgcctgcagcacccccacttcaagcgcctgggcgacctggccgccggcacactggtgatctaccgggaacaaccgctggtacggccccagattcctcaagcaacagccctgcgcttgccctttgccctggatttgagtgaacaacgggcgatccttggttttgcggaacgccaaggggaactgtccaccgagcgtgttcacgaattggcctcgattctcgccgcgcccttgcaggtatcccccgaccgcgctgcggaacaactcaatggcgtggcccgcggcctgctggggccgacatgaaacagagccttttcgaaagccgtcaccaacgccaatggcaaaccttcgccgagcagctcacacagttggagcaagggcaggccaaagccgctgaagtggccgatttccctcatcaatatcgacgcctgtgccagcacctggccctggcccaggaacgtggctacagcagctacctggtagacccattgcaacaactggccctgcgcggccaccaacaactctaccgtcatcgcagccaactggcggcgaatgcgctgagctttgtactcgccgattttcctcggctggtacgggaacagtggcgtttcgtgctgatcgccagcctgctgttcttcggcagcctggtgggtattgccctgctggtctacctgtttcccgacctgatctacagcatcgtcagcccgcaacaggtggccgagatgcaggccatgtacgaccctgatgcaagccgcctgggccgcgccgccgagcgtgcatcaagtgaagactggatgatgttcggctactacgtgatgcacaacatcggtatcgcgttccagacgtttgccgccggtttattgttcggcctgggcagcgtgttctttctgattttcaacgggctcatcatcggtgcggtctccggtcacctgaccgagatcggctatggccagaccttctggtcattcgtcatcggccatggcgcattcgaactgaccgcgatcgccctcgccggtgccgcaggcttgcagttggggtgggcactgatcgcccctggacaactgacccgtggtgaatcattgcggctggctgcacgcaagagcgtgcgaatgctgtgcggtgtcatgctgtttctgctgatcgcagctttcatcgaggcatattggtcatccaccaccgtgataaccccgtggatcaaatacctagtgggcgctgttctgtggctgctggtgggcacttacctgggctttgccggaaggaatcgccatgcgcctgactgatgccagtgtggtcatccggccgcgtactgcctgggaagccatggatcttggcgccttgatggcacgggagcatcgcgtgctattgatgggcagttgggcgttagtcaccctacctgtgttcgccttgcttacagccctgctgtggcagtatccgtccaccgccatatttcttttctggtggctcaagccggccttcgaccgcttgccgctgtacattctgtccaaggccctgtttggtgaaacgcccactatcaagcacgctgtgcgccagtggccgcgcctcctcaagggtcaactgctggccagcctgacctggcgacggttcagcctgagccgcagctttgtaatgccggttagccaactcgaaggcctggacggcccggcacgccagaaacgcctgggcgtgttgcagcaacgcaatgccggagccgcacgctggctcaccatcatcgggatgcaccttgaaatcggcctgtggttcggctgcatggcactgttctatctgttcatcccgcaaaacctcgagatggactgggactggcaacgcctgttgttggcgacaagctcggaagggttgtggctggagcacctgggcaacgcgttctatgccttgctcctgatattttgggaacccatctatgtcgcctgcggcttcagcctctaccttaatcgtcgcaccgtattggaagcctgggatctggaactggtattccgacgcctgcgtcaacgcctgagcaatgtggcaccgatgttgttgctgatgatcggactgatgctgctgcctctcagccttcccgtcatggccgatgcttccagcccctccaagccactgagcactccgagcgcgagccaatccatcaaatcgctgctggacaagccgcccttcaaaaacccggaaaccgtgacccgttatcggtttggagaagaaaagccagccggtaaaaacaaaacgcccaataacggcagacttcccgattggctgaaggccttgctggacaacctcaacagcaataccttcaagcacatcgcccaaggcctggaaattctgctgtggagcgtgttcattggtagcctgatcatgcttgtgtggcgctatcgcgagtggttgcgcacctttgtcagcagacgcggaccgcgcaagacagaggttgtcaaaccgctgcccacgcagttgttcggccttgaactgggcaccgaaaccttgcccgacgacgttgccggcgccgccgaacacctatgggccacccaccccagggaagccctcggcctgctgtaccgaggcctgctcagccggttgttgcatgatttcaacctgccgttgaaagacgctgataccgaaggccaggtcctggcacgtgtacaccagttgcaacacccccaactgctggccttcagtgatgagctgacccggcattggcaaaacctcgcctatggtcaccacctcccagcgctccctgcccagcagaaactatgcagtgattggcgcgccctgttcagtccagggagcaactgatgaatcgtccattactgtgggtggggttattgctggcatgcctgcttggagcgggcggttactacgtgtggagcaaggcgattccctatgacgaagtggtggatcgtggtccttcgccggaggcactggccaatccctatctggcggccgaacactttctgcgtcaacaaggcctcaccgtggaacacgccaatagcctgaaacggctgggcaccctgccttccaaaggcaacagcctgctgctgctcggcgaacgcagtaacctgtcaccacgccaggtagaacagttgctggcgtgggccagatccggcggtcatttgcttgtggtcgccgaggcgctgtgggatgaagagacaggcaaaagcggcgacctgctgctcgatcgcctgcatattcaccagaccttgagtgacgagcctgaagaatctgccacttccgtcaagaagccctcgaagatgaaagccccggacctgaccaagctctatgtcgacaatgaaaccgcatcggcttacttcagtttcgacacagatttcaacctcaccgaccccaggcacctggctcaattttccgctaacagcgcgagggccagccacctgatgcagcttgacctcggggaaggccgcgtcacagtgatcacggacagcgacctgtggaaaaccccgaacatcggaaagcacgacaatgcctggctgctctggtacttgaaccagggcaccgccgtgaccttgctgttcaacagcgatttcgacgacctgcttagcttgctgatgcgctatttcccccaagccctggtcgcactcgttgccctcgtcgccttgggactttggcgtgccggcgtgcgtcaaggcccgatccagcaccccgcttcccctgctcgtcgccaactgcaggaacatctgaaagccagtgccgacttcctgctgcgccgcagcggccaaggcacactgctgcagactttgcagcgcgatatcctgcgtgcggcccgacgccgtcaccccggctttgaacacctcgacaacgcagaacagtgccgggtgcttgaacacctgacgcgccaaccccctcacgtgatcaaccaggcccttggcccactcccggcaaaacggctttccagcgccgacttcagccggcaggtggcgtgcctgcaaaccctcaggaatgccttatgagtgatttcccaagcgccactgccttgacccgcgaatccctgcaacgcgccactgggcaagctcaagccctgcgaaccgagttgcgcaaggcggtgattggccaggacgcggtgatcgacgatgtcctgaccgcactcatcgctggcggccatgtgctgctcgaaggtgtgccggggctgggtaaaaccttgctggtacgtgccttggcacgctgcttcgagggcgatttcgcacgtatccagttcaccccggacctgatgcccagcgatgtcaccggccacgccgtgtacgacctgcacaccgaacaattcaagctgcgcaaggggccggtgttcactcatctgttactggccgacgaaatcaaccgtgccccggccaagacccaggcggccttgcttgaggccatgcaggagcggcaggtgaccctcgaaggcgaggcgctgcccatcggccaaccgttcatggtactggcaacccagaaccccatcgaacaggaaggcacctaccccctgccagaggcggaactggatcgcttcatgctcaaggtgcgcatggattaccccgacgcgcagcaggaactggacatggtgcgcgaagtcacacgctcgtcgcgggccgacatgctggatgtacacccattgcgcacggtgttgcaggccgaagatgtgctgcaactgcagcaggttgccagtgaccttgccctggacgaacaggtgctcgactatgccgtgcgcctggcgcgcgccacccgtaactggccaggcctggcgatcggtgctggcccacgggcgtccattgacctggtacgcggcgcccgcgcccgcgccttgttgcgcggtggtgagttcgtcacgccggatgacatcaaggaatgcgccctggcagtactgcgtcaccgcgtacgtatcgcgccagagttggatatcgacgggctggaggtcgaccaggtgctcaggcaattgctcgatcagattccggcacctcggcaatgactcgcctatgaagccgacccgtctgctgttgaactggctcggcgcattgctgggtctgggcatcctgctgggcactgcggcagcgttgcagctcacagtatcggacaccttgcactcactcgtctggggattactcctggcgttgttgctgttggccatgctggacgccgtacgagggcatcgccgcccctctccgcgtatacaacgacagatgcccggcagcctggcgttggggcgctggggcgaaatccgcctggccctggaccacgacttcccacagccgctgacggtgcaggtattcgatcatgcccccgacgggttgagcgtggagaacatgcctcagtccataaccttgtatcccggtgaacgctgcgaactgggctaccgtcttcgccccctgcggcgcgggcatttcagtttcagccgctgcgaagttcatctgcccagccccatggggctatggtctgcacgacgctatatcgaggtgaacgacaccacccgcgtctacccggatttcgcccgactgtacggcgcccaactgctgggcgtagacaactggttgagccaattgggcgttcgtcaacgccaacggcgtgggttggggctggagtttcatcagttgcgcgagtttcgcgaaggcgacagcctgcgccagatcgactggaaagctactgcccgacaacgcacccccatcgcccgtgaataccaggatgagcgcgaccaacaaatcgtgttcatgcttgactgcgggcggcgcatgcgcagccaggatgacgaactgtctcactttgaccatgctctcaatgcgtgcctgctgctcagctacgttgccttgcgccaaggcgatgccgtggggctgtgcacctttgccggtgaccagtcgcgctacctggcgccggtcaagggcagtagccagttgaacctgttgctcaatgcggtgtacgacctggacaccacccgacgcactgccgattaccaggcggcggcaagtcaactgctggcccggcagaagcgtcgagccttggtcattgtggtgagtaacctgcgggacgaggacgatgaagcactgttgactgccgtcaaacgcatcagtcgccaacataaggtgctggtggccagcttgcgcgaggaggtactcgaccaactgcgccatacccctgtgcaaaccttgcccgaagccctggcctacagcggcaccatcgactacctcaacacacgggatgagttgcatgaccgcctgagcgcgcacggtttgtccgtgctggacaccttgccctctgagctgggccccgcattggtgacacgctacatgggttggaaaaaagccgggaccctctgaggagaaaggttctgaaaagaaacactcgaccacggcagggcataaagcccctgaaccgggtcgagagcatgttgccgctaagccgaagcctgcaaaggatcaaaactgaagtaatgcaacaacacgttgatcaattgcccatactcctccggggcctgctgcacactgaacccggagtcgtaatgctgggggttgatatcttcgtgactccacaggcaggtagccgtgagatcaattggatggaaggtgccgtcagcctccggaatcttcaagcgcagctcgaaatccacgtcgaccatcatgggcaattggctgatcaacatcagcccatcttccgatacattgcccaaaaagccgatgggcttatcggtgagtcggttaaacacttgcaggaaataaggtagctgatgccgctcgatccgtcggtcggtaaacatggtgagatcgccatccagtggccataactgcggccgtgccagtgattcggaacgagaaaataacgcccgctctccatggatctcggtacgacaacaggcaatagtccgccgccagaacagctaccgaatccgggccccacattcgtttgcatggaaacttgtacaaacgaacatccaaaggatagcccaagactggcaacaggccagttatgaaatgacgaatatcatcacaacgaagcgggacgtggctgggcgacacttgcaccggggtaatgccccagctgctgcaaggtatcgagcctcgcacgagcacgataggcgtactcactcgacgggtactgattgatgatgaattgataggtctgcaccgcatcaacgaacagcttttgccgttccaggcactgcccgcgcaacatcgagacctccggctgcacatagcggcgcgtgcggctttcacggtcgacctgggataactccagggtgacacgctcgcaatcgccgaccttgtaggcacgataggcattgttcaaatgatggtccatcgaccaacgggtgcagccgacaacactgacggccagggcagcaacgagcaaaattcgcatgagggttctcctgtcttgtgcagtgtatcgacccctcgtcgaaaatcttcaaggatgttcgtattcagccgcagcgaaaacaagtcaatcatcgataagtagtgcaaacgaacaatgactacaacgaaagagcatagtagccttcctcagcgcttgaactcaggagtctgtgcatgtccgtccgtcgtaccaaaatcgtcgccacccttggcccggccagtaactcgccggaagtcctcgaacagctgattctggctggtttggacgttgcccgtctgaacttctcccacggcaccccggacgagcacaaggctcgcgccaagctggtgcgtgacctggctgccaagcacggccgcttcgtggcactgctgggcgacctgcaaggccctaaaatccgtattgccaaattcgccaacaagcggatcgagttgaagatcggtgacaccttcaccttctccaccagccacccgctgaccgaaggcaaccagcaagtcgtgggtatcgactacccggacctggtcaaggactgcggcgtcggtgacgaactgctgctggacgatggccgcgtggtcatgcgcgtcgataccgccaccggcaccgagctgatctgcaccgtgaccatcggcggcccgctgtccgaccacaaaggcatcaaccgtcgtggcggtggcttgacggcaccggccctgactgaaaaagacaaggccgacattaagctcgccgctgaaatggaagtggactacctcgccgtgtccttcccgcgcgacgccgccgacatggaatacgcccgcaaactgcgcgacgaagccggcggtaccgcctggctggtggcgaagatcgaacgcgccgaagccgtggccgacgacgaaaccctcgacggcctgatcaaggcttccgacgcggtgatggttgcccgtggcgacctgggcgtggaaatcggtgacgccgagctgatcggtatccagaagaagatcatcctgcacgcacgccgccacaacaaagcggtgatcgtggcgacccagatgatggagtcgatgatccagaacccgatgccgacccgcgccgaagtgtccgacgtggccaacgccgtgctcgactacaccgacgctgtgatgctgtcggccgaaagcgccgccggcccgtacccactggaagccgtgcaggccatggcgcgtatctgcgtcggcgccgaaaagcacccgaccagcaagacctccagccaccgtatcggcaaggtgttcgaaagctgcgaccagagcatcgccctggccgccatgtacaccgccaaccacttcccgggcgttaaagcgatcatcgccttgaccgaaagtggctacacgccgttgatcatgtcgcgcatccgttcctcggtgccgatctacgcgttcactccgcaccgcgaagcccaggcccgcgcggcactgttccgtggcgtgtacaccattccgtttgatccggcttcgctggcaccgaacgaagtcagccagaaggcaatcgacgagttggtcaagcgcggtgtcgtggagcaaggcgactgggtcatcctgaccaagggcgacagctaccacaccaccggtggcaccaatggcatgaagatcctgcacgtgggcgacccgcaggtctgagtgacacgctgaaaaacaaaagccccgccatgaaaatggcggggctttttgcatttcagggaagctgttgtgtgatgccaaaggacctcatcgggggcaagccccctcccaccttttgaccgcgctgcctatcaaatgtgggagggggcttgcccccgatgaagcccgatcaaccaccacacgttcatcgccgggtgataaacgctgacaacgccgcaatcgcctcaggcgacttcaaccgttgggtgaacaaagcgccctcctcctcgatcacctgccgcaactgctcgcgatccacactcttcatcaactgcttggtgacctgcaccgcccccggcgccagggtctcaaaacgctcggctacttcccgcgccttggccaatgcagcctcgccactgcccagcgcttcggtggcaagcccccacgccgctgcctgttcgccgctaaacccctcgcccagcagcagcaattcggcggctttcgcgtgccccagcaacctcggcaaaatcaggctggacccgaactccggacacagccccaggttgacgaacggcatgcgcagccgcgcatcgcggctgatatacaccaagtcacaatgcagcagcagggttgtgccaatccccaccgcagcccccgccacggcagcaatcactggctttctgcaattgagcaggcttttcatgaagtgaaacggtgggctgtcgaggtcgttgggcggctgttcgagaaaatcgctgatgtcgttgccggccgtgaaacactcattgctgccctggatcagcacgcaacggatatccgcgtccgcgtcggcgtgctccagtgcattggccaattgcgtgtacatggcacgggtcaaagcatttttcttgtcgggacggttgagctgcaggatcagcagcccgcgttcgcgcacctgttggatggtatcggtcatgacgagtctcgcggcgggaaaaatcagcgctcaaccacgaggcagaaacacatcggccagcagctgattacgcggcaatcctgccaggaacaggcgcttggaaaacgcctcgacgctggctgggtgcccgcagagtaaggccagcgtttgccgcgaaacaagccgcagttgcgccaatgcctgggccacctgcgccgccgtccacagttccaccgacacgtttggatgctgtgcagccaactgcgccaagggttcggccagataatggccttcggcatcatgggccaggtgaatcacgcggatggcgccctggtgatcctggcgcagcgcctcacgcaacacgccccacaacggccccaacccggtgccggacgccagcagccacaatggccgcgtttgccagtccggatcatattgcagcgcaccgccgcgcaaatcacccaggcgcagccgatcacccacctgcaactgccgggcaagatcgctgaattcgcccggcaggcgacaatcgagatgaaactccaggaatggatcttcctggggcaagctcgccagggaatacggccgcgccacctgcccggcccacaacaccaggtgctgcccagcccggtaacgcaaaccgcgctccggttgcaggcgcaggcgcagtacgttcgggttcagccaatcgacacccaccacctgggccggcaagccatcacgcgtcgggtcaaacgcttcaacccgcagatcgccgctgacctgacactggcaggccaaccgccagccgtcctggcgctgcgccgggctcaaggcttcgggctgcttgtcttcgacctcgccctggcaacgcaccaggcaggcatggcaactgccggcgcggcaactgtaaggcacggccacacccgcctggttcaaggcatccagcaggttgctgccgggggttaccgaccaatggcgttcgccgacgtacagttcaggcatataaggactcagtcacaaggggcgcgcacagggaatcatgcctgcgacagtttgaccatagtcgggtgtatcggccaccgcgccgggttatactgccgcgcctttttagcgtcgcgcctgcaccactttggcgtgccttggaaaggtggacccagccgaccgatgcaacactgggcccacctttattgaatgttcccttatagaggagcgcgactcatgaccgtgatcaagcaagacgacctgattcagagcgttgccgacgccctgcaattcatttcctactaccaccccgtggatttcatccaggccatgcacgaagcctacctgcgcgaagaatcgccagcggcccgtgattccatcgcccagatcctgatcaactcgcgcatgtgcgccaccggccatcgcccgatctgccaggacaccggtatcgtcaccgtgttcgtgcgcgtgggcatggacgtgcgttgggatggcgccaccatgggcctggacgacatgatcaacgaaggcgtgcgtcgcgcctacaacttgccggaaaacgtcctgcgtgcatccatcctggccgacccggcaggtgcacgtaagaacaccaaggacaacaccccggccgtgatccactactccatcgtcccgggtaacaccgtggaagtggacgtggcggccaagggcggcggttccgagaacaagtcgaaaatggccatgctcaacccgtcagactcgattgtcgactgggtgctcaagacagttccgaccatgggcgccggctggtgcccaccgggcatgctgggtatcggcatcggcggcaccgccgagaaagccgcagtgatggccaaggaagtgttgatggaatccatcgacatccacgagctgaaaaagcgcggcccgcagaaccgtatcgaagagatgcgcctggagctgttcgagaaggtcaaccaactgggcatcggcgcccaaggcctgggtggcctgaccaccgtgctcgacgtgaagatcatggactacccgacccacgccgcgtccctgccggtgtgcatgatccccaactgcgccgccacccgtcacgcgcattttgtgctcgacggttctggcccggcgtcgctggaagcgccaccgttggacgcctacccggaaatcgtctgggaagccggcccgtcggcccgtcgcgtcaacctcgacaccctgaccccggaagaagtacagagctggaagccgggcgaaaccgtgttgctcaacggcaagatgctcaccggtcgcgacgccgcgcacaagcgcatggtcgagatgctgaacaagggcgaaaccctgcccgtggacctgaaaggtcgcttcatctactacgtcggcccggttgatccggtacgcgaagaagtggtcggcccggctggcccgaccaccgcgacgcggatggacaagttcacccgtcagatccttgagcaaaccggcctgctgggcatgatcggcaaatccgaacgcggcccgactgcgatcgaagcgatcaaggaccacaaggccgtgtacctgatggccgtcggcggcgccgcttacctggtggcgcaagccatcaagaagtcgcgcgtagtcgcgtttgccgaactgggcatggaagcgatctacgagttcgatgtgaaagacatgccggtgaccgttgctgtcgacagcaagggcgaatccgtgcacatcaccggtcctgccatctggcagaaaaagatcagtgaaagcctggcggtagaagtgcaataagcgcttcccctccaaacataaaggcgactgcggcccatggcccagtcgccttttttatggcacatgctatggtgcactccccttaccgtgcctgcccatcaccgtatgatcgcgatcccccgccccctgcgcctgaccttctactccctgctgatcatcgccggtgccctgctggccgcagccttggccactcgccacgccgaacgccaggccctggtggacgatgccgcccgtgccaatcagcaactggcactctatgccaactcgttgcacaccctgatcgaacgctaccgcgcgctacccgccgtgctggcgctggactcggaaatgatcagcgcgttgaaaggcccgctggacgccgccactcaggacgtgctcaaccgcaagcttgaacgcatcaatggcgccgcgcagtcctccaccctggaattgatggatcgcaccggcctggcggtggccgccagcaactggaacctgccgagcagttatgtagggcataactatgcgttccggccttacttcagccagaccttgagccagggcaccgggcgtttttatgcggtgggtgtgacgaccggcatcccagggtatttcctctccagcgcggtgctggatgaacacgagcagttcctcggcgccatggtggtcaagctggaatttcccgagcttgagcgtgaatgggcccagggcaatgatttgctgctggtcagcgatgcgcggggcatcgtgtttatcgccaaccagcccggctggcgttatcgcaacctgcgtccgttgtcggccaacgacctcgccgagctgaaagccacccgccaatacgacaaaaaacaactgcaggcgctggagacccagaccctgcagcgctttgacgaaaacagccacctgatgcgcgtcaacggcccggacggcaatgccaattacatctgggagtccttgccgctgaaagccgaaggctggaccctgcacctgttgcgcaagccccagttcgcctttgaagatcaacgcaacgccggcctggcggccgccggttcctggctggcgttggtattcctagtgctgttcctgacccaacgctggcgcctggcccgcttgcgccagcgcagtcgcgaagagcttgagcaactggtggaagaacgcacccaggcgttgcgcaccgcgcaggatggcctggtgcaatcggccaaattggcggcgctggggcagatgtccgccgccctcgcccatgagatcaatcagccgctgacagcccagcgcatgcagttggccaccttgcgcctgctgctggatcacggccgcgtcgacgacgcctaccaggccctcacgccactcgacgatatgctcacgcgcatggccgccctcaccggccacctcaagaccttcgcgcgcaaaagcccgagcggcctgcgtgaacgcctggacctggccaccgtggtcgaccagtccctgcacctgcttgacgcccgcctgcgcgatgaggcgatcggcgtggtgctggacctgacccgacctgcctgggtgcgcggcgatgccatccgcctggagcaggtgctgatcaacctgctgcgcaacgccctcgacgccatggccgacaaaccgcgcaaacgcctggaaatccgcctgcacgccgatcagcagctgtggcaactgacggtcagcgacagcggcggcgggattgccgaagaacacctgaacagtgtgttcgacccgttctttaccaccaagccggtgggtgacgggctcggtttggggctggcggtgtcctacgctatcgtgcacgaattgggcggtcgcctgatcgccggcaaccgtggcgacggtgcggtatttaccctgactctacccatcgcgctggagacgcccgacctatgttgaacgcggtgattgtggtcgatgacgaagccagcatccgcacggccgtcgagcaatggctgagcctgtcaggctttgaggtgcagttgttcagccgcgccgacgaatgcctggcgcaactgccccgtgatttccccggcgtgatcctcagcgacgtgcgtatgccggggctcagcggcctggagctgctggccgaagtgcgacgccgtgatgccgatctgccggtgattctgctcaccggccatggcgatgtaccgatggcggtcgaagccatgcgcgatggcgcctacgacttcctcgaaaaacccttcagccccgatgccctgctcaacagcctgcgccgtgctttggacaagcgcgggctgatcctggaaaaccgtcgcctgcaccaacaggccgatcatcgggcgcaattggaatcgacactgctgggcgtatcccgaagcttgcagaccttgcgtcgccaggtgctggacctggcgaacctgccggtcaacgtactgatccgtggcgagaccggcagcggcaaggaaatggtcgcgcgctgcctgcatgatttcggccctcggtcaaagaagccttttgtagcgctcaattgcgcggcgatcccggagcagttgttcgaggccgagctgtttggtcacgaaagcggcgcgtttaccggcgcccagggcaagcgcatcggtaaactggaatacgcccacggcggcacgttgttcctcgatgaaatcgaaagcatgccgctggcccagcaggtaaaactgctgcgtgtgctgcaggagcagaagctggagcggctgggctccaaccagagcatccacgtggacctgcgcatcatcgctgccaccaagccggacctgctggaagaagcccgcgccgggcgctttcgcgaagacctggcgtatcgattgaatgtcgcgcaattgcgcctgccgcccctgcgggagcgtcgcgaagatatcccgttgctgttcgatcacttcgcacagagtgccgccgaacgcctgggccgcagcgtcgagccattgagcggcgcgcagttggggcgcttgctcagccatgactggccgggcaacgtgcgcgagttggccaacgtcgccgaacgccaggtgctgggccttggcgacccggaaccggaaggcatcgaggccggacagtccctggccgcacagcaagaggccttcgaagcgcactgcctgaaagccgcgctgacccgacacaagggcgatatcaaggcagtactggccgagctgcaactgccgcgtcgtaccttcaatgagaagatgcagcggcatgggttggtgcgggagatgtttctctaggcgaatccttgtgttgactggcaggccgctatcgggggcaagccccctcccacattttgatttgtgaacgcgctcaagtgtgggagggggcttgcccccgatgaggacagcagccataagcggatttccgctcacccccctgaaaatcatcagcgactttccgctcaaaaaaatcaccaaacccttctaggccgggccttcatccacctggcacagctcctgctatagctcgagccaggctgcgcacgcgccgctccataaaaacaactagatgaaggatccttcaatggataactccaacgccctgcctctggggtcggcggccgcgccgacgaaagagcgcactacctccagccgcatcaaatcgattttcagtggttccgtcggcaacatggtcgagtggtacgactggtacgtctacgccgctttctcgttgtacttcgccaagactttcttccccaaaggcgacaccaccgcccaactgctcaacaccgccgcgatcttcgccgtgggctttttgatgcgcccgatcggtggctggctgatgggcctgtacgccgacaaggtcggccgtaaaaaagccttgatggcctcggtctacctgatgtgcttcggctcgctgctgattgccctgagcccgggctatgaaatcattggtatcggtgcgccgatcctgctggtctttgcccgtttgctgcaggggctgtcggtcggcggcgaatacggcacctccgccacgtacctcagcgagatggcgaccaaggaacgtcgtggtttctactccagcttccagtacgtgaccctgatctccggccagctcatcgccctggcggtgctgatcgtgttgcaacaactgctgaccaccgagcaactgtatgcctggggctggcgtatcccgttcgccatcggtgccctctgcgcggtggtggcgctttacctgcggcgcggtatggaagaaaccgagtcgttcaccaagaaggaaaaagccaaggaaagcgcgatgcgcaccttgatgcgccaccccaaggaactgctgaccgtggtcggcctgaccatgggcggtacgctggcgttctacacctacaccacctacatgcagaagtacctggtgaacaccgtcggcatgagcatttccgactccaccaccatctcggcggcgacgctgttcctgttcatgtgcctgcaacccattgtcggcgggctgtcggataagatcggccggcggccgatcctgatcgccttcggcatcctcggcaccctgttcaccgtgccgatcctcaccaccctgcacaccatccagacctggtggggtgcgttcttcctgatcatggcggcgctgatcatcgtcagcggctatacctcgatcaacgccgtggtgaaggccgagttgttccccaccgaaatccgcgccctgggcgtgggcctgccgtatgcgctgacagtgtcgatcttcggcggcaccgctgaatacatcgcgctttggttcaagagcatcggcatggaaaccggttactactggtacgtgaccgcgtgcatcgcggtgtcgctggtggtctacgtgaccatgaaggacacccgcaaacactcgcgcattaccaccgactaaacgtcagttgcagtcaacctgtgggagggggcaagcccctcccactttttaaatcaggacaagtcagctatcgccttacgtccgtaccgccgctgcgcgtacgacgcccccgcaatcatcaccaccaacaccgccgccaaaactgccgacgaaccgatggtgccgaaatccagcccacccttctcatggggcttggtaaggaagtcacccaaggtcgcgccgaacggccgggtcagtacaaacgccacccagaacaacagcactgaagaaatcctggtgaagtatttgagtgccaccaccgccgcaatcgccgagccgatcaacaacgcgccgccggcaaaacccagccctgagtcatctgccaggaaatcgcccaacgcggtgcccaaggtgttggagaacaggatggccatccagtagaacaactcaccccggaaggtctgcaccttgttcacgttcagcgaatcgccgctgaggtgccacaacgcgaagatgatcatcaggatcgcgaccaggatcatggagcccgcggcataacccagccccaaggtgcggtccatgaaatccgacatggtggtgcctgcggtgctggtggacaaaatcacgatccagtacagcaccgggttgtaggttttcgagcgcagttgcgtcaccagggtgatcaggaacacgctgatcagcatcatcgaactgatggcataaccgacattgagggtcatcgacagcaaatccccggcggtttcgcccagggtggtcgcgcagattttcatgacccagaacgccagggtgatctgaggaagtttattcataagggggaaggctccaaagctcagtctctcaataggccgacttatcgggttgtcgacagtgggcgcagactgacggtggagctgtgaaaaataggtgggcgatgaatgaaaattccatagtatggccacttcatcgacgaccactgcaggagccccggccatgcccgacgatatccacttctacgaacccgccaacggccacggcctgccccatgacccgttcaatgccatcgtcggtccacggccgatcggctggatttcgtcccacgaccgcgaaggccgcctgaacctggcgccctacagttttttcaatgcgttcaactacattccgccgatcattggattctccagcgtcgggcgcaaagacagcctgaacaacatcgagcagaccggcgagtttgtgtggaacctggccacccgcccgttggccgagcagatgaaccagagttgtgccccggtatcaccggacgtgaatgaattcgaattgtccgggctgaccccagtggcctcgaagatcgttggtgtaccgcgggtgggcgagagcccggtgtcgttcgaatgcaaggtgacgcagatcatccagctgcaacgtgccgacaaagagttggtgccgagctggctggtgctcggtgaggtggtcgcggtgcatattgccaagtggctgctcaaggatggcatctacgacaccgccgccgccgagccgatcttgcgcggtggcggaccggcggattacttccagctggggccggaggccctgttcaagatgtatcgcccaggcgccggcaaaccttgactgaaacacaataaaacgtgggagggggcttgcccccgatggcaatggcacatccaacatcgttgttgactgacacactgctatcgggggcaagccccctcccacattggattgtcggcgttgctcagttggcggcgctcgcccaggtcagctgcccctcttcatccacaccgatcagccgttcaagctgcacggtggctgcatcatcggcatcggcggccgtcttgaacgtctgtccgtccaggattttgtgaaactgcggggcacccatgccatcgagtgccttgacggcgacggcggcgctgtagcccccttcacccggtactacggcggatacggcttcgtggtgggcaaattgtttacgtgccatgttgcaggtcctggccaatggaaagtcggccattctagaccttcagccggcgagttgcaggtactcgccgtaggcgtgtgcggcggatgcatcggtaaaggtctggaagtccatgctgcgcacgaccatgtcgttcaacagctcggtaaagatcatcagcgctggagaattgaagtaggcgctcatcgcctgttcgctgctccagaaaccggagatcaaccatacatcgggatcgacctgggaatgctgcaacgagaattgcaggcaaccctgagcctggcggcccggttcgatcaaactgctcaagcgtgcaccgagttcggtgctgcacccggtgcgggcgcggataaaggccatatggctcgcgggaatgggggtggacatgttcgactctcccgttgagaagtgatgctcggcaagcactgtgagggcgtgttgccacaggatcaaagataacggcgcgggtagtcgcgcggttagtcaattcctgtcggcttattgcacaatcctgcgagaagcgtaggggggacgttcggcacagcggttttattccagggcccaacgccttgtttcagggagatgacaggtgccgcgattgcctgattcacgatgtatcgcaggatcaggcaaggattgtgcagaatcgacgtaacactgtttgaaaagccgccgctaagctgaacccatcgaagtagcccctagaggacgttccatgtcgtcgcccgaacataaagccatccccctcgacgccgagatggaaaaacagcgcgccgaactggccagcatcgtgcaccggcatacctgggaggacggctcctacggtacggccatcaccactctgtttctgaaccgccacaacaccccgcgcgacttcatgccggtgctggtggaaccggccctgtgcatcctggccagtggcagcaaggaagtccgcctggccgacgagatctttgcctacgacccgctcaactacctggtgttctcggtggcgatgccggtggccgggcggatcatcgatgccacgccggaagacccgaacctttcggtgcgcatcaatatcgatccggcgcaactgacagccctgatcgcagaagcaggcccaatgggcgtgccgtcgcgcccgacttctcgcggcatgtacgtcgatcgcatcgacggtcaactgctggacgccgtactgcgattggcccgcctgttggatacgccgaaagacatcgccatgctcgcgccgttgatcaaccgcgagattctttatcgcctgttgcgcggcccgcagggttatcggctgtatgaaatcgccgtggccaacagtcagagccatcgggtcagccaggcgatcaagtggttgaacggcaactacgaacaaccgctgcgcatcgatgacctcgccaaggaagtgaacctgagcgtctcgaccctgcaccaccgtttcaaggcgatcaccgccatgagcccgttgcaataccagaagcagttgcgcttgcaggaggcacggcgcttgatgattgccgaagggttggaagcgtcggcggcggggtatcgggtggggtatgaaagcccatcgcaattcagccgggaatacagccggttgtttggcgcgccgccgttgcgtgacctggcccggttgcgccagagcatttaatcgagggtgcgcggcagctgcaacgtcacccgcaacccaccctcacgcaaattctgcaaactcacttcaccgccatggctgtgcgcaatgttgcgcgcaatccccaggcccaagccgtaaccctgttgctgcccggccaggcggaagtgtggctcgaatacttgctccaaccgctgctccggcacgccaggcccctcgtcgtccacatgcaggacgaactccgcgccatcgtcctcgatgtgcagatgagcgttctgcccgtacttcaaggcattgtcgatcaggttgccaatgcaacgtttgagcgccagcggcttgcccggatacgccgccagggctgcaccgttcagcgtgacccggccgttgccgttgggtgccacgtaaggctccaccaggcattcgagcacatggttgaggtccaccggctcgatgttttcgtggatatccgtgtctttcacgcattgcagcgcgcccttcaccagcaactccagttcatccaggtcacggccgaacttggtttgcaggttctcgtcttccagcagttccacgcgcaggcgcaggcgggtgatcggtgtgcgcaagtcgtgggaaatcgcactgaacaactggctacgctcggtcaggtagcggctgatgcgctcacgcatggcattgaaggcacggcccacttccaccacttcgctgccaccgccttcggccactggttccacgtcggcccccagggacatatcccgcgccgcccgcgccaaacgcttgagcggccggctttgccagtgcaccagcaggccgatgaacaacagcaaaaagccgctggtcaacacgatgaaccacacctgctgggacggcaggccctgttcttcaaggctggtgtagggctcgggcaacagcgaggcgatatacaaccattcgcccggggcgagctggatctgggtgaccagcaccggcgggttcaccggttccagggtcagcgcgtagtgagcccaggaacgcggcagctcatcgagtttcaggccggcattgaagatgcgcaggtcttcggcgctgacgaactccaccgacatatgcacatcggcgccgagggtctgcttcagcacctcatccaccgcttcaagcaccgcctgtttacgcggggtctgcggcaggatggccatgtccagcgggcggtcattgagggtcaccacgaaacgcgtgccgcccatgctgcgcagttgatcgagcaccagtgggcggtaggccaccggcaacgagcggaaataactcacgctggcggtcatcgaatgcgccaggctgcgggcgctggtgaccaggccttcgagctgggtggcgcgcaattgcgagacccagatcacgctggacagcgcctgggcgaacagcaccgccagcagcgtcagcagcagcatgcgccccagcagcgaacgcggcaccgggaaacgccggcggtgttcggtcaaatgttcagtggacattgccggcaaccacgctggctgccagttgataaccactgccccgcacggtgcggatcagacgagggggcttttcggtgtcgcgcaggcgttggcgcaggcggctgacggccatgtcgacgatgcgatccaacggcatcaggtcgcgaccccgggtagcattgccgatggtgtcacggtcgagaatctgctgcgggtggtcgagaaacaatttgagcagggcgaaatcggccccggagaggatcacttcttcgccgtccacatggaacaggcggtggctgatcatatccagccgccactcatcgaataccagcacttcgccgccgttgctgcgctcctggccgaactggcaacggcgcaacaaggccttgatccgcgcttgcaactcgcgagggctgaagggtttgccgatgtagtcgtcggcgcccagctccaggccgatcacacggtcggcctcgtcggaactggcggtgagcatgatgatcggcacctgcgcctggcgcgggtgctggcggatccagcggcaaaggctgaaaccgtcttcgtccggcaacatcacatcgaggatgaccaggtcgcacggcgcctcgttcatcgcctggcggaaccccgcgccatccggcaccccacgcacctggaaaccggcgcgactgaggtaggtctgcagcaattcgcggatttcctggtcgtcgtcgaccaggaggatcgatttactgattacgctcacggggtcctccttgttgttatggggggttgttgatggcctcatcgggggcaagccccctcccacactggaatgcgttcccaatgtgggagggggcttgcccccgatagggccatcagcccctatgcaaaagcctgttccaacgcgacgccagccccggtcaacccggaatacggcgcggtcaccaaccacaccggaatacccttgaagtagtcgctcatgcagcctttgtcagcaaagctcctggcaaaaccgctgtggataaagaagtcggcaaacctcggtatcaccccgcccacgatgtacacaccaccgcgtccaccggtggtcagcacattgttaccggcgacgcggcccagccagatgctgaactggtccaacacctccatcgccaccgggtcaccggccaggccggcggccgtgatggcttcgggcgtttccagtaccggcgcatggccgtcgactgcacagatcgcccggtacagacgtggcaacccaccaccgctcaaagcggtttcagcgctgacatgcccgatctcggtgtagatgtgctgccacagttgggtttcccgtgggctgctcagcggcaggtcgacatgcccgccttcccccggcagcgccgcaaagcggccaccgcccaagtccagcaatgtaccgacacccaggccagtgcccggaccgatcaccaccgcaggccgcaacggctccggcgtgccttcgcagaccacgcggaattcgtcgggcttgaggcgggtcatgcccagggccatggccgagaagtcattgaccagcagcagttcgtccacctgcaacgccttgcaaaacgcagtcttgctcaggcgccagtgattgttggtgaatttaaattcatctccgctcaccgggccagcgacagaaagacacaccgcgccgatgtccccgatttccaggccttcctctttgaggtagaccttgatcgcctcttcaggactcttgtgatccgccgtggcatgcacacggatcgaatgcagttcctgatcccgccacaacgcaaaacgggcattggtgcccccgatgtcaccgaccagcgcaagcttcacttaagcgtctccaaggcacaggtaaaggcgctggcgccctgctctgcggagcttgcggccaagcgcataaatgcaaacagctcgcgaccggcccccacgttattgcccaacaggcccgtggcaggcgcgcgcgctgcaaattcttcggcgtccaccttaagctccagggtgcccttcacgccatccacgcgaatgatatcgccatcgcgcacccgcgccagtggtccgccgctctgggcttcggggttgacgtgaatcgcggcggggatcttacccgacgcgcccgacatacgcccgtctgttaccagcgcgaccttgaagccacggtcctgcaacacaccgaggaacggcgtcatcttgtgcaattcgggcatgccattggagcgcgggccctggaagcgcatcaccgcgacgaagtctttttccaactggccggccttgaacgcgtcggccaggtcctgctgatcctggaacaccacggcgggtgcttcgacaatctggtgttcaagggccacggccgagactttcatcacgccgcgccccaggttgccttccatcacgcgcaagccgccctcgggcgagaacgcacgggccacggggcgcaggatgctttcgtcgaggctctcgatcgggccgtcgcgccagatcagctcaccgtcgaccaggaacggttcctgggtgtagcggctcaggcccttgccggccacggtgttgacgtcttcgtggagcaggccggcttcgagcagttcacggatcaggaacgacatgccgcccgccgcctggaagtggttgatgtcggccttgccgttcggatacacgtgggaaagggtcggcaccacctcggaaaggtcggccatgtcgtcccaggtgaggatgatgcccgccgacatggcgatggccggcatgtgcagggtgtggttggtagagccgccggtggcgttgagcgcgatgatggagttgacgatggacttttcgtcgacgatctcgccgatcggcatgaagttgccgttggccttggtcaggcgcgtgacctggtgcgcggcttcgcgggtcagcgcgtcacgcagcggtgtgtacgggttgacgaacgaggcgcccggcaggtgcaggcccatcacttccatcaacaactggttggtgttggcggtgccgtagaaggtgcaggtgccggggctgtgataggacttcatctccgattccagcagctcttcgcgggtggccttgccttcagcgtagcgctggcgcacatcggctttctgcttgttggaaatgcccgacggcatcggcccgcccggtacgaagatcatcggcaggtgaccgtagcgcagcgcgcccatcatcaggccggggacgatcttgtcgcagatgcccagcatcaaggccgcgtcgaacatgttgtgggacagcgctaccgccgtggacatggcaatgacttcacggctgagcaggctcagctccatgccgggctcgccctgggtcacgccgtcgcacatcgcgggcgtgccgccggcgaactggccgaccgagccgacttcgcgcagggctttcttgatctgttcagggaaatgttcgtacggctggtgcgccgagagcatgtcgttatatgacgaaacaattgccacgttggcggcattcatcatgcgcaggctatttttatcttcagtgccgcaaccggccacgccgtgggcaaagttggcgcattgcagcttgccgcgcatcggaccgtcgctggctgcgccgcgaatgagcgcaaggtaagcctcgcgggtggcgcggctgcgggcgataagccgttcggtgacctcaagaacgcggggatgcatgtgtagaactccaggctaacggatgtggcgacctgagtgtctatgctgatcaaacgcccgcagcgcatgggatggcagggagtcgtttggatcatcggaccagttgattcaggtcactcgttgtagattgaacaaaatattgccactaaaaaggcttgttttctatttttatgcgaataatcttgtaattcttacaacaaatcgacgacaggcactttccaatgactcttcgtatcgcaatcaatggttttggccgtatcggccgtaatgtcctgcgcgcactgtatacccaaggctaccgccaggatttgcagatcgtcgccatcaatgatctgggcgacagttcgatcaatgcccacctgctcaaatacgacaccgtacatggcactttcgaagcagaggtcgcccacgatcaggaaagcctgaccgtcaatggtgaccggattgccgtcagtgccattcgcaacccggccgacctgccctgggctgcgcacaagatcgacgtggtgttcgaatgcaccggcctgttcaccgaccgtgacaaggctgccgcccatattaccgccggcgcacgcaaggtgatcatctcggcaccggccaagggcgcggacgccaccgtggtctacggcgtcaaccatgacattctgcgtcaatcccaccagatcatctctaacgcctcgtgcaccaccaactgcctggcgcctgtggctcaagtgctgcaccgcgagctgggtatcgaaagcggcctgatgaccaccatccacgcctacaccaatgaccagaacctgaccgacgtctaccacaccgacccgtaccgcgcgcgttcggccacccagaacatgatcccgagcaagaccggcgccgccgaagcggtaggcctggtgctgccggaactggcgggcaagctgaccggcatggcggtgcgggtgccagtgatcaacgtgtcgctggtggacctcaccgtacaactgaagaaagaagccacggcgcaagaagtcaacgcgctgctcaaagaagcaagccagcactcgaagatcctcggctacaacaccctgccgctggtttccagtgacttcaaccacaacccgctgtcgtcgatcttcgatgccaatcacaccaaagtcagcggtaaattgctgaaagtgctggcctggtacgacaacgaatggggtttctccaaccgtatgctggataactgcttggcgttgtgcaacgccgaataacgtggtttctgcgggaccttgtgaaggggcttgtgtgggagggggcttgccccctcccacattggtttgtgtcgcgcataaggaaaatagccacttgccatttgagttgatgataagcattatcattaactgcaaatcggtctggtagcactgtgagccaatctcgcttcaaccacgtctttctcacccaacgggtggttctgcttcgcaccttgcagcggatggtgaataaccacagcaccgccgaggacctgttgcaggaaacctacctgcgcgtcactcgggccctgagcgagcggccgatcgatcaccttgaacccttcgtctatcagaccgcgcgcaacctggcgctggatcatctgcgtgcgcgcaggatccaggcccgtacgctgcaggaagatgtcccgctggacgtcctgcaaagtgtcgccgcccccatcagcacgcccgaagatgccacccaggccgagcaaatgcttgaggccctgagcgtcagcctgggccagttgagcgcccgccagcagcagattttcatcctcagccgcctgcacggttgcagttaccaggagatcgccgatcagctggaagtgtccttgagcaccgtgcaaaaggaactgaagttgatcatggccatctgtgtaggtgtggccgaacgactggatcggccttaagcttcacccgacagaaacgtcgaccctagctgtaggaaagttgaatagaacgtggcgaagacccgaggaacaccgtgacggacccgaacaaactgcgcccccatgatgtggctcatgaggtgttgcaagacacggctatggaccaagccctcgactggctgatcgccttgcagtgcccgcagcccgggcagcaggccgaattcgaagcctggctggccagcgatcccgctcacgtccacgccttcgccaaggcccaggctgcctggggtggcgcgccagtgcacagcgccgccgtggccctggcagcaccgcgcaagcccagcgcctggcggcggatcaagccccattggaaaccgttggccaccgccgccgtgttgctgatcggcctgttcagcttcagcaacctgccggtgcgcctgcaagccgatcacctcaccgtggtgggtgaacgccagcgcctgcaactggacgatggttcaaaggtgttgctcaacaccaactcggcgttttccagcagcatcaaggaccaccagcgcatcgcccgcctgtaccagggcgaggcgtttttcgaaatcaagcccaaccatggcctgcccctggaaatcgacgccggccccgtacgtgccagcgtgcgcgatacagccttcgccgtgcgctacctcaatggcgaagcacaggtgcaagtgcagcgtggtgatgtcgacctgagcaataccttcgacgatgcccgcgtgcgcctgagcgccggtgaaagcatccgtatcggccccaagggtttcggtgcgcccgccaaactggacgccaacaaggacctggcctgggtgcaaggtcggctgatcttcgaaaactgcccgatgagcgaagtccttgccgaactgcgccgctattaccccggctggatcgtcaacaccaacgaccaactcgccagcgtcgccgtcaccggcaattaccgcctggaccagccgctggacgtggtgcgctccctggcccacatcacctcggccaagctgtcggaatacccggcactggtgatcctgaactaaatgagaattatttttactcgatagtcggcagtggtacgtctcgtcttagccaatgcaactgattcctatttgattcagttcgcaactataagattcgtaccccggagcgctctcgatgtcctcttgtttcaaccgccggtcctcttcgcccgtcctgtccttgctgacggtcgccatcctgctggccggtgcgccaatgatgaccgccaccgccgccgaacctgccccacgcagccacggcaactacaacttcagcatcgagcagcaatcgctggtctccgcgctcaacgcttttaccgccgtgaccggctggcaagtcggcctgccggcggaactggcccagggtgtgtcgtcccctggcgtacgtggcccgttgccgccggaaaaggccctggaccggctgttggtggggaccaacctgagctaccgcaagctgagcagcaacaacattgttctcgaaaagcgcacggcgggcagcaccctcaacctgcaacaggtgaccatcagcgccacccgcaacgagcaggatgtaaacagcgtaccgagcaccgtcagcgtgcaggatcgcgaagaactggaccgccagaacgtcaacaacatccgcgaactggtgcgctacgagcccggtgtctcggtcggcggcgcgggcacccgctccggtaacgccggcttcaacatccgcggtatcgacggcgaccgcatcctcacccaggtggacggcgtggaagtgccggacaacttcttcaacggcccctacgccaagacccgccgcaactacgtcgacccggaaatcgtcaagcgtgtcgagatcctgcgcggcccagcctccgccctgtatggcagcagcgccatcggtggtgccgtgagctacttcaccctcgacccggacgacatcatcaagcccggccaggatttcggcgctcgcctcaagaccggctacagctccgccgacgaaagctggctgacctccggcaccgtcgccggccgcgtacaggacttcgatggcctgctgcaccttagccagcgcaatggccacgagaccgaatcctacgacggcaacaacgccaccggcctggcccgcaccggcgccaaccccgaggacgcgcgcaccaccaacatcctggccaagctcggctggaactatggcgatgacaaccgcctgggcctgacctatgagaagtacaaagatgatcgcgacgtcaacctgaagaacgccgtaggcggcccgttcatcggcggccgaggctttaacctctaccgtgatcgtcgtggcaacgacaccattacccgtgaacgtttcggcctggaaaacagctttgccctcgagtcaccgattgccgaccgcatcaagaccagcctcaactaccagatcgccaagaccgaccagaccaccgccgagatctatcagtcaggccgtcgtgtcttgcgcacccgcgacacgctctaccaggaaaaacagtggatcttcgacgcccagttggacaaagcattcagcctcggtgaaaccgaccaccaagtgacctacggcaccaccctcaagcagcagaaagtcaccggttcgcgcgagggcaacgcgacctgcgtggccgtcggcagtggttgcaccgccatcggcgcgcccagcccgattgccagcgacagtgtgaagaagtccagcgacttccccgatccgaccatcaacacgtattcgctgttcgcacaggaccagatcacctgggacaagtggaccttcctgcccgccgtgcgctacgactacacccagctcaaacccaagctgacccaggagttcctcaacaccgtcaacccgacaggcgcggacccggtgagcgacaaggaaaaaacctggcaccgtgtgacgcccaagtttggcctgacttacgccctgaccgatcaatacacctggttcggccaatacgccgaaggtttccgtacgccgtccgccaaggccttgtacggccgctttgaaaacctgaacctgggctacaccgtcgagccgaaccccgacctcaagccagaaaccagcaaaggcgtcgaaaccgggattcgcggcaagttcgacgaaggctccttcgagatcgccgtgttttacaacaaataccgcgactttatcgacgaagacaatgccgttgccggcggcagccttgaacagttccaggccatcaacatcaagcgcgccaccatcaagggcgccgaagccaagggccgcctgaacctggatgccttcggcgcgccgcaaggcctctacacccagggctcggtgtcctatgcctacggccgcaacgacgataatggcgagccgttgaacagcgtcaacccgctcaagggcgtcttcggcctgggctatgaccaggacaactacggtggcctgttgagctggaccttggtgaaaaagcaggatcgcgtcgacagcacgaccttccacgcgccggacggcgacaccagcggccccttcaagacccctggcttcggtgtggtcgacctgacggccttctacaaagtcactcaggacgtgaccatcaacggcggcctctacaacctcaccgacaagaagtactggaactgggatgacgtgcgcagctacgacagcgtcggtgaagccgctgtgaccggcccggccaacctcgaccgcctgacccagcccggccgcaactttgcgatcaacgtgatctgggacatctagcaacgccctactcacctcgtcgaaatttcatcgacggggtgaggattttttactgtgccgcgtcttcttgttcgtctagttgataacagctctctttcgggcactaaggcgtatcccttctcaaggactttttcatgaccgcttcccctaccgcagaacgcgcaagcctgcgctcccaacgcctgaaccagatcaccaacgagccgcacaccaagctggacgcactggtcaaggcccacgccccgtttgaaacccaggccaacttcgcccgtttcgtggtggcgcagtacctgttccaatcggaactggtagccctgtacaacgatgccgaactgatcaagatcgtgccggacctggccgagcgttgccgtgccgaagccgccaaacttgacttgggcgacctcgacaccgacgtacctgcaccggttgccggcgcagtgaaaaacccgagcaaggccgaagccctcggctggctgttcgtgtccgaaggctccaagctgggcgctgcgttcctgatcaagcgtgccgtgggcctgggcctgagcgaaaccttcggtgcccgtcacctgggtgagccggcgggtggtcgtgccgagggctggaaaagcttcacccgcaccctcgacgccctggaattcagcgccgaagaagaagccgccgtggaaaaaggcgcaatcgacgcgtttgtgcgcttcaccgtgttgctcgaacaggcgtacgctagcgcccctgaattggcctgacatccagattgaaatgccatcaactgtgggagggggcaagccccctcccacagttggcgctcacttcgcgacgctacaaataaaccatgacccgcaaaaccccttccacctcgaaaatcgcccggatcctcttcggcctgctggcctatgtcagcctgggcattgggttgatcgcgattgtcgtgccgggtttgcccaccaccgaattcatcctgctggccgcctgggccgccaccaaaagctcgccacgcctcagcgcctggctggagaaccaccggctgttcgggccgatcctgttcaactggcgcaacggcaagatcatcgctcgccgggccaaggtcagcgccaccgtaagcatgctgctgtgcgccgtcctgatgctggtgatgctcgaccacggctggccaatctacctggccattgccggaatgagcctgggcaacctgtggatctggtctcgacccgaacgactcgcacagcccgtatgacgttggctgtaggcattttcctaccactcatcgcctgctgctcatgaataaatttgttacgccgatgtttcagacatagcgctgaatggacttggcctgcactgcgtgccttccaacaagtccattcgcgagtgagcctatgttcaacaccctctccatccgcttgaaaatcgtgctgttgtccggcctttgcctgctgggggtgatagcgctggtcgtcagcatcaatatctacaacaccagccagaatgatctgttggtcagcgattccagctcgcgcatgctcaccgccagcgtggaacaactgctgcaagccagggccgccgagcaagcgggccagttgcagaaaaccttcggcgacagcctgatggcgctgaccgcgctggccgaccagatcaaggatttgcgcagcatggccagcaagcgtggcctggaagccggcacgctgcgcgaagaaatcaaccagagcctgaaaaccaccttcgatcgcaacagcaaagtgctcggtttctggctgtcattcgaacccaacggcctcgacggcaaagacagcgaattcgtcgatgacaaggcgcgcgcctccaacgaaaaagggcgcttctccagctattggagccgtgccggcggtgagggcttgaacaccatcatggtcgaagaagacctgaacaagaccagcctcaccctcaacggtacgccctacaacatctggtacacctgcccacgggacacacgcaatacctgcctgctggacccgtatgaagacacggtggcgggcaaaaaggtattgatgaccaccatcgcctcgccgctgatcgtggagggcaaactcatcggcgtcgtcggtgtcgacatcgccctcaccgccctgcaagcaaccgccgatgccgcacagaaagacctgttcaacggcgccgcacacctggaaattctgtccagcaccggtctgatcgcggcctatagcggcgaacccgccaaagtcggcaagaacctggtcgacaccctcggcgccgagggcaaggaaatcgtgcaactgctggccagtgacaaccgcatgatccgcgaacaggacggcaccatgcgcgccgtgtacccggtcaaaccgattgccgacgccaaaacctggggcgtggtgatcaagctgccaaaagcggtaatgctcgccgataacgtcaagttgcagggagtacttgacaacgctcaggcagccggcaccctcaaggccctgctggtagccgccgccgctggcctgctgggtttgctgctgatctggctgaccgccaccggcgtgacccggccgatcaacagcgtggccgccatgctcaaggacatcgccagcggcgacggcgacctcacccaacgcctggcctacgccaagaaggatgaactcggcgaactggtgaactggttcaaccgcttcctcgacaagctgcaaccgaccatcgcccagatcaagcaaagcatcaccgaagcacgtggcaccgcagaccagtcttcagccatcgcacgccagaccagcgaaggcatgcaggtgcagttccgcgaaatcgaccaggtggccaccgcgtccaacgaaatgagcgccaccgcccacgacgtcgccaacagcgcgtcgaatgccgccagcgcggcacgcggtgccgaccagtcggcgcgggaaggcatgtcgatcatcgagcagagcacccgcgacatcaccaccctggccgaagaagtcagcaaggccgtgggcgaagtcgaagcgctggcggtcaacagcgagcagattggttcagtgctggaagtgatccgcagcattgccgagcagaccaacctgctggccctcaatgccgccatcgaagccgcacgcgccggggaaagcggccgagggtttgcggtggtggccgacgaagtgcgcaacctggccaagcgcacccaggattcggtggaggaaatccgtcaggtgatcgaacgcatccagagcggcacccgtggcgtggtggcgaccatgcattccagccagagccaggcccagaacaatgccgggcagatccatcaggcggtgcaggccttgggcaagatcagcgatgcggtcaccgtgatcagcgacatgaacctgcagatcgccagcgccgccgaacagcagagcgccgtggccgaagaggtcaaccgcaacgtctcggcgatccgtaccgtgaccgaaaccctcaccggccaggccaccgagtcggcggcgatcagcagccaactcaatgcactggccagccagcagatgaagttgatggatcagttcagggtgtaaacccaatctcaaaaacaacacagttccaatgtgggagggggcttgcccccgatagcagagtgccagtgaacgcctctgtagctgacacacccccatcgggggcaagcccctcccacagttggttcactttggatttagagaccggtccaggcactgacaaactgcgtcaggtcttctttagcagcagtacgcggcgggttctgcggcgtgcccaggtacaggaagccaatcacctcctcatccgccgtcagccccaggcctttggccacatgggccgaataggacaactcaccggtgcgccacaccgcaccaatcccctgggcataagccgccaacagaatgccatgagccgcacaggcagcagccagcagttgctcggacttcggcaccttgaagtgctcctgcaaacgagcaataaccaccaccaccaacggcgcgcgcaacgggccgttctgggccttgtcgatcaccgcttgcggcgcatcggcgtcttgcagccgggccgcttcggccaacaaagtgcccatctgctcgcgggcagtgccttcaaccgtgaggaaacgccaaggccgcagttggccgtggtcgggcgcacgcatggcggcggcgaacagcacgtcgcgctgctcctgggtcggtgccggttccagcagacgcggcacggaaacacggttgagcaaagcgtcgagagcctgcatgggccacctccagaaaaaaatgtgcggtcattctagcgggaatgaatcgggatgccaccaaacgataattgctcttattcattgcgccctgccctgttagactttgcgaccctattttcagcagtggttcaggaaactcgatgttccgttcgctttttcgcctgtccgcagcattgctggccttgagcctggctggctgcgatgacgcgcccaggtttaccaaggccgagccgggtgaatcacgggcgggcggcgctgcgacggtgaacaagcgcgaccagaacgcgttttccctgccctcggccaacctgtcgcccacgcggcgcctggacttcagcgtcggcaacagcttctttcgcagcccctgggtgatcgcaccgtccaccaccacggcgcgtgatggcctaggcccgctgttcaacaccaatgcttgccagaactgccatataaaagacggccgtggtcacccgccgctgcccgatgcgcccaacgcggtgtcgatgctggtacgcctgtcgattccggatacgcccgcccatgccaaggccatcgagcagattggcgtggtgcccgagccggtctacggcgggcaattgcaggacatggcggtgccgggcgtgccgccggaaggcaaggtgcgcgtcgactacacgccggtcaacgtcaccttcaaggacggcacggtggtcgagttgcgcaagcccgacctgcagatcacccagcttggctatggcccgatgcaccccgacacgcgcttttctgcgcgcatcgccccgccgatgattggcctgggcctgctggaagccatcagcgacgccgatatcctgcgcaacaccgacccgaagaccgccgccaagggcgccatcatcggtcgcgccaattgggtctgggacgacgcccagcaaaaaaccgtgctcgggcgttttggctggaaagccgggcagcccaacctcaatcaacaaaatgttcacgcgttctctggtgatatgggcctcaccacgtccctgagaccctttgatgactgcaccgatgcccaagtcgcctgcaaacaggcccccaacggtaatggccccgatggcgagccggaagtcagcgacaacatcctgcgcctggtgctgttctacacccgcaacctggccgtacccgcgcgccgtggcgtcaacacgccgcaggtgctggccggtaaaaacctgttctatcaagccggctgccagggttgccacacgccagcattcaccacggccgccaatgccgccgaacctgaactggccaaccaggtgatccgcccctacagcgacctgctgttgcacgacatgggagcgggccttgccgacaaccgcagcgaattcaaggccggtggccgcgactggcgcacgccgccgttgtggggcatcggcctgacgcaaaccgtgagtggccacacccagttcttgcatgacggccgcgcccgcaacctgctcgaagccgtgctatggcatggcggcgaagcccaagcggcgcagcagcatgtgttgtccttcaatgccgagcagcgcgctgcgttgctggcgttcctgaattctttataagcttcgccccacttacagaagggagctcgacatgttccgtcccaagttgttgttcaccagcctggccgccctagccctcggcgcctgctcgccgcaagacccgcaagcggtgacctcggcggccatcgccaagcaagtgatcctgccgacctacagccgttgggtcgaagccgaccgccaactggccgtcagcgcgctggcctactgccagggcaaggaaagcctggacaccgcgcgtgccgacttcctgcatgcacagaaggcctgggccgagttgcaaccgctgctgatcgggccgctggccgagggcaaccgttcgtggcaggtgcaattctggccggacaagaagaacctggtcggccgccaagtcgagcaactggtcgccagccaaccgcagatcgacggcgccgccctggccaagtccagcgtggtggtgcaaggcctgtccgcctacgaatacatcctctacgacgccaagaccgatatcgccgacgacgcgcaaaaggcccgttactgtccgctgctggtcgccatcggtgaccgccagaaggccctggccgaagagatcctggccagctggaacagcaccgacggcatgctggcgcagatgaccaagttccccaaccagcgctacgccgactcccacgaagccattgccgatctgctgcgcgtgcaggtgactgcactggacaccctgaagaaaaagctcggcacgccgatgggccgccagaccaagggcatcccgcagccgttccaggccgatgcatggcgcagccagtcgtccctgcaaagcctcgaagccagcctggcggcagcccagaccgtgtgggtcggcgtcgacaacaaaggcctgcgtggcctgctgccgtccgagcagaagccattggccgacaagatcgacgccgcctatgccgcgtcgttgaaactgttcgccagtaaccagcgcaccctcaatgaactgctggccgacgacgccgggcgccagcaactcaacgatatctacgacagcctcaacgtcgtccaccgcctgcatgaaggcgaactggccaaggcgctgggcatccaactgggctttaacgccaacgacggtgactgatgatgctcaggcgacaggctttggccgttggtagcgtgctgctcagtgcactcacactgggcggctggacgctgttcaaaagcaaagacaagggcccgctgctgctctcggcgcgggatgatgcagacggcaagcactacgccgtgggctatcgcctggacggcaagccggtgtttgccacccaggtcggccagcgctgccacgacatcatcaaccacccgacgctgccgattgcgctgtttgtcgcccgtcgcccgggcaccgagagttacctgatcgacctgcgcgatggcgcgctgttgcaaaccatcacctcccacgtcaaccgccacttctatggccacgcggtcatccacaagagtggcgactggctgtacgccaccgagaacgacacgtccgaccccggccgtggcctgctcggtgtgtaccggttcgaaggtgagcggctggtgcacagcggtgaaatctccacccacggcatcggcccgcaccaggtgtcgtggatgcccgacggcgaaaccctggtggtggctaacggtggcattcgcaccgaagccgaaagccgcgtggagatgaacctcaacgccatggaaccgagcctggtgctgatgcagcgcgacggcaccttgatcagcaaggaaaccctcggccagcagatgaacagcgtgcgtcacatggggatcgccagcgatggcaccatcctcaccgggcaacagttcatggggccgtcccaggagcgctccgagttgttggcgatcaagcgtccagggcagccgttcgtggcgtttccggtggccgacgagcagttgcaggcgatggggcactacaccgccagcgtggcggtacacagcgaattgcgcctggtggcgttgaccgcgccgcgtggcaatcgcttctttatctgggacatggacagcggcgagctgcgcctggatggccccctgcccgactgtgccggcgtgggcgcggtcgaggatgggtttgtcgtgacgtcgggccagggccgttgccggttctacgattgtcgccagaaacagctggttgcaaaaccgctggaattgccggcagggctctgggataaccatctgcatctgatctgagttcgcgtcgcttttcacccgacacgagccggatgccaacccaaaaaaaaggcctcgcaacgcgaggccttttcattttggttttaaactcatcaactctgtggcctcatcccttgagacattccaaacatgaacagcaataactcatgatcaggcttggccgccgtgctcgctttggcaacgcgcggcaataggcattgcgcgccaccctgcgttgcactgagcacctgtgtgcgaggctgttcccacgccgccagcgccaaggctgcgatgcccagcgctccgaccaaaaacagacctcgtgctatttctagcttcatctggttaaacccttgatagcgctgccaaacgccgtctcgtaaaagtagctgagtttcttccagtcggtatcgttccacgacgaatggcggcgcaattgcagcatgtcatgggaggcggcccgataagcggtcaggcgctggcgacatttctcgaaatccagcagcgccacttcgacgttggccgagtcaccctcgcccgtcacccgcacgaagatgtgcttgatgtagaggcagccatgttgccatcggcccttgtgcatgcgcgccagggtgccggccagttccttgagtacacgctcatgcaccagttcgccgtattgctcgcggccaccggcggcgtaccagttctcgatttcgtcgaaaccgtcgagagccgcagtgaccaacagcgctttccattggtgctcggggtcgcggcgcgcttcgcaaaacaccatttccggcacacgcacgtccaaaaggcgcaggcccttgatcgcatcgcgctcgcgcagcaccgtcgggcggccaaacggatgcagccaactgcggtagatgtgcccggtctggcgtttgctgtagagcaagcggccgttggggctgatcacacgctgcacaccgctttcaccaccacgccgacggttgggctcttcgacccactcgccctgctggcgccagaaataatcaaagcgttcttcgggcgctacatgactgcctgctacgcactcaactgccatcctgttacctcttgcgcaatacatacactcgccacatggcgtagagcggtatgaagtccagggattcctgaacacgaaaaccggcttcctcaaattctgcttcaacagtagcagccggtaacacaaacctgttttggtaaccttcctgctcaccttttacacgacgttgctgttcaagacgcttgcgtttccaggccttgaaattgccgtctacccataacgaaataatcacgctgtcacgggtaacgcgttgaaactcccgcaatatggccatgcgatgtgccgggtcaccaatgtggtgcaacaggcgcatacagaaaatgctgtcgaccgcgttatcttgcagatcaatatcaaaggcagatgtctgcaagggccgtacccgtttcaccacatcggcgggctgagcggccatcgccaccttcaacatggacgccgaattgtcggcaccgatgatcacgcggttgggtttttccgccagcaagggccagaaacgcccagcgccgcacggcaagtccagcactaggccaggctcacccgccatcgccagcgcaccacgggccaattgctcgtcgcgtttgtgggacaaccggcgcgccagattgtcctgatgcttgagcaaatattcctgagcgtgttcgtcgtcgtacttttcggaaaattcgagcttgatcggatcagacatcaacggatctccagtagctgatgcctacaaccttaagcagcgcactgtgatcaacaggtcaacccgttgtgaaaaacttgtcctgtccaatctcatacatttcaagactttacagacacaagcgatagcatggggccatcttcgccgaattaccgggatctctggcaggatagcggcagggggtggagtcaggcgttgacctgactcaattgcacatgaaagcggcagccgttgggctccatggtgctgaggctgacgctccacccctggttctcgcagatacgctgcaccagcgacagccccagccccaggccctcaccgcgcttctcgctgccgcgtacgaacggctcgaacatcgcctcgcgcttgtcctcggggataccgacaccgctgtcctccacgataaatccgctcggttccagggtgagtcggataaacccctgctcggtgtagtgcagggcattgcgcagcaggttgcccatcaccgcatgcaggaaggtggtgttatagcgtgtatccaggggattgccgggctggtagatcagctccaggcctttgtgctcgatgggctcacgccagatgccgagcagatcatccgccacctgcgtcaggctgacctggggcgacatcgccgcgtcgttgtgctgggcacgggccagcatcaggaaggtctgcaccagttcgcgcatttcttcgcaggcccgagcaatgcgcaatacctggttgcgcccgcgctgatcgatagcggggttttccagcagcaattcacaggagctggccagtaccatcaaaggcgtgcgcagttcatggctcacgtcactggtgaacagctgttcacgggacagcgcctggcgcagccgtcccagcgtggcgtcgaacgccaccgccagctcacccacttcatccgcagcgtaatccggcgccagaggcggggccaagccgagcagttggtcgcggtgacgcacctggcgggccaggcgcaccaccggcgccattaccttgcgcgccagcacccagccgaggaacaccgccagcgccaggctgagcacaaagcccaccagcaccacggcgaacaacacgcgctcgcgctcttcgaaatcgctttgatcctgcaacagcacgtagcgccgcccatcgaccacttcgaccatggcgtggtacgacagcgcctcgcggaatacttcatggaaaccgggctcaaggtgacgcaggtccttgggcaactcgaagtcgccggggccgccgctgaaataaaatagctggtctggctcgggccggtgccgccagtcctcgacggtgtccatcagcagcaggcgttgcaagtcgccgcccaggcccgccgagatcaacttctcttccaccaggtgcaccgtcgcgacaatgcccatggcgaaggcccccgccaccaacgcactcatcaaggcaaaggcgatgatgatccgttgcgcaaggctttgcttaaactccatcacgaccctcggccaggcgataacccacaccgtgcaccgtttgcagcaacggcttggcgaacggcttatcgatcacttggcgcaattggtgaacgtggctgcgcaggctgtcgctgtccgggcagtcatcgccccacagggcttcttcgagaatttctcggcgcagcacgtgcgggctcttctgcatcaacaccgccagcagcttcaggccgaccgggttgagcttgagcaggcgcccttcgcgggtgacttccagggtatcgaggtcgtagctcagatcacccacctgcagggcgcggcgaccgccgccctgggcacggcgcagcacggcttcgatgcgggcggccagttccgacagggcaaagggcttgagcaggtagtcatcggcgccggacttgaagccctgtagccgatcgtccagttggtcgcgggcggtgagcatgatcaccggcgtatcgcggcgggcatcttcacgcaggcgcttgcacagggtgtagccatcgatgccgggcagcatgatgtcgagcacgatcaggtcgtaatgctcggtggcggccaggtgcaggcccgacaaaccgtcctgcgcacagtccacggtgtagcccttgagccccaggtaatcggccaggttggccagaatatcgcggttgtcttcaaccaatagaattcgcatgggcagtgtctccgtacgcggtaacggccgtgttggctcgcgcagcttaaggccaagtgtggctcagggatagacccgcaagggccgtcgataaaggttttcaaccgatattttagttgaacgagattttcactatagcttcacaaactgactacagtgtcagggcgaagatcgcgcccatcgatataaggaagttggacatggggtttctcaaaacagcgcctatgcgctatttgctgttggtcaccggtgcctggctggttgtgttcctgctcacgcgcagcgtgttgctcattactcacctggatgaagtcggtggcaacctgctgccggtgtttggcgtgggcctgctgtacgacctcggctttctggcctacgcggccctgccactggggctgtatctgctgctatgcccacccgccctctggcgccgtcgcggtcaccgctggttcctgcaggcggtgctgaccgtcagcctgttcgccatgctgttcacctcggtcgccgagtggttgttctgggatgaattcggcgtgcgcttcaactttatcgccgtcgattacctggtgtactccgatgaggtgttgaacaacgttctggagtcctacccgatcggcaagttgcttagcctgctgacgatgctcgccgttgtgttgagcctggccctgcgcaaaccgttcaacgccgcgatgaatgcaccgctgccgacaatgcggggtcgcctggtcaatgccctgggccttttgatcgttgccggcctcagcctgcaactgatcagccaggacagcccgcgcgcccaaggcggcaacgcctacaaaaacgagctggcgagcaatggcccgtatcagtttttcgccgcgttccgtaacaatgaactggactacacccagttctataaaagcctgcccgcggatgtcgtcgccaaacagttgcgcgccgaactgagtgagcccaatgctcgcttcatcgacaaggaccccttggatatccgccgcgccatcgacaaccccggcacgccgcgcacacccaatatcgtgctggtgaccatcgaaagcttcagcgccaaatacatgggcagcaacggcgacgagcgcaacctcacgcccaacctggatgcgctgcgcaagcagagcctgtacttcaataacttctatgccaccggcacccgcacggatcggggcctggaggccatcaccctggcgatcccaccgacaccgggccgctcgatcgtcaaacgcatcggccgcgaaagtggcttcgccagcctgggccagcaactcaccgccatcggctatgacagcgtgttcgtctatggcgggcgcggttacttcgacaatatgaatgcgttcttcagcggcaacggctatcgggtcgtcgaccagagcagcgtgcccgaatcggagatctcattcaaaaacgcctggggcatggccgacgaagacctctacaaacaaaccctgaagctggccgatgccgactacgccaagcagcagccgttcctgctgcaactgatgaccacctccaaccatcgcccctacacctacccggatgggcgcatcgatatcaaatccggcaacggccgcgacggcgcggtgaagtacaccgaccacgccatcggcgaattcctggaggcggcacgccagaagccgtggttcgacaacacgatcttcgtgttcgtcgccgaccacactgccggcagcgcgggcaaggaagacttgcccatcagcaactaccagattccgctgttcatctatgcgcccaaactggtcgacgcccgggaaaccgcgcaactggccagccagatcgacctggcgcccaccttgctcggcctgctcaacctgagctacgaatcgaccttcttcggtcgcaacctgctgcaagacaacccactgccaccgcgtgtggtggtcggcaactaccagcacctggggctgtttgacggcaaagacctggcgatcctcagcccacgccagggcctgcgtcgccacgatcaggccctgggtgaaagccaggagctacgggtgggcagtgatgacccgctgatcctgcgcgccatcgcctactaccaagctgccagctatggcttcaaacagcagttgctgggctggaaagcgccgaaggtcgcagaacccgccgtcagcgcccgctgatcgccacgcgtggcccttgcctcctgcggggcaagggcgtaacacttgcgcccattctccggcgacgacgccctttcatgtccgacaccctgctgctgatcgaagatgaccgcccactggccgcgctgacggcggagttcctgcgcgccgagggattcaacgtggcggtggagcaccgtggcgaccgtgccgcccagcgcattcttgacgaacaaccggcgttgttgatcctggatgtgatgctgcccggcatcgacggttttaccctgtgccgacagatccgcgagcagtaccccggcctgatcctgatgatgacggcgctggacgaaaacgccgagcaattgacggggttcaacgttggtgcggacgattacgtggtcaagccggtcgacccgctgttgttgctggcgcgtatccgctcgctgctgcgtcgccatccccaggcgccccgtgcgtcttaccaatggggcacattccgcttggacctcaacggccatttcgcctggctcgacgaggtgcccttgcagttctcggtggccgagttcgagttgcttgcgatcttcgcccgccactgcggtgtgttgctgacccgggaaaaactcctgcaaagcctgcgcggcctggagtacgacgggctcaatcgctcggtggatatgcgcgtgtcacgtctgcgcaaaaagctgatgagcctggggtgcccggtgacgatccagaccatcacggcccagggctacctgtttgtcgaaacaccgcaagaggcccggcatgttctctagagtgcgaccctggatggcgattctcgcgggcactggctggggcgcattcaccctgtatttgctgtggctgtgcgccaatgcctcggtatttgtcggcgaatacagctttttgcgcttgatggccgggccgggctatctggtggcggagcaactcaaggccctgccggccgaccagcgtgaagcccgtatggaggtactgcgcgcgcgcttccagtacccgatccgcctcgtcaccctgggcgaggtcgaactgccgcccgaagccctgatcatgctgcaacaccagcaaccggcacagagcagcgatgaagacatcacctatttcccattcgatgacaaaacgctgatccaattcggtccgatgtggggaaccgccgaggtcaaggacctgctgcaattcccggtgtatgggatcaccgcgtgcgtggccgccctgccgctgttgctgtggatgtggttcggcctgcgtgcacgccgccaacgaaatgctgatctgctggtccttgatgcctgcctgggcaccctggcccgcacgcccaacgcgatgctgccggccatgggcaaggaatgggcgcccgtgctgcagaccttgcagcaacatgcccaagacatcaccgccatgagcgaacgccaccgggaggtttcccaggccgtctcccatgagttgcgcacaccgttggcccgcatgcgcttcgctttgaccctgctgagcaaaagcgacgatcccgccacccgcacgcgcttgcaggaacgcctgcaaaccgatgtggaagagcttgaagccctggtgcgcgccagcctggcctttgcccgcatggccggcgcgcccaccgacctgcagcatgagcccatccctatccgtgactggttgcatcaggagtttgccttgctcgacgggcatcagcggcgcctgagcctggacaccgagccggcggacctgcaactgatcggcgaccgcgccttgttgcacttgatcgtgcgcaacctgttgagcaacgccatcacctacgcccgcgaccaagtgagcgtcagtgctgcccagcaggatgaccaacacctggtgctgcatgtggacgacgacggccccggcatactcgccgaaaaccgcgaaaagattttcgaaccgtttgtgcgactggccatgggcggcgatgagcccggcggcttcggcctcgggctggcactggccaggcgcgccacccaatggcatcgcggtgagctgtctgtggcgcgcagcccgttgggcggggcacgcctgaccctgatcctgccactgcgcccccagtaaccttcgtgttacagcctgtgacagtgaaccgctggcattctccgtaatctcgccacctgatccagggttgcccctgcgccctgggtccccgtcctttggacccggttggagagcccgttcatgcgtcccccaaaacagcatttacccacgttgatgctatcgctgtgtatcgtcgccagcgcgctgctgaccagccaagcggctgccgtgagccgcgcagcgcctgacttcactggttcgatcaagtcgcccggctacgactcccacacccttaaactgctgggcgaggtgaccatgtccagccgctggcggcggcccatacccaggccacgcactaaagccgcgactctgtctgcccaagggccgctcggccacacgtctgcaccgtggtcctctgcacgtgtgccctcggcgcttgccagagggatgaccttcaagaggctgttgcgacgcggcggcatgggctgaacgctcaaccaagcataaaaaaaccccgcctgcatcactgcaggcggggttttttatgagccgggtaaggctggcttacatcatgccgcccatgccacccatgccgcccatgtctggcataccgccgccagctgcgccttcagccttaggcttgtcggcaattgcagcttcggtggtcaggatcagaccgccgatggaagctgcagcttgcagcgcggaacgagtcaccttggttgggtccaggatgcccatttcgatcatgtcgccgtagacgccagtcgcagcgttgtaaccgtagttacctttgccgttcttgacttcattgaccacaacgcttggctcgtcgccggagttggcagcgatctggcgcagtggcgcttcaacagcgcgacgcagcacagcgataccgacgttctggtcagcgttgtcgccggtcaagttggtcagggcttccagagcacggatcagcgcaacgccaccgccaggtaccacgccttcttcaacggctgcacgggttgcgtgcagggcgtcttcaacgcgggctttcttctctttcatttcaacttcggaaccggcgccaaccttgatcactgcaacgccgccagacagcttggccagacgctcttgcagtttttcacggtcgtagtccgaggaagtttcggcaacctgggcacggatctgagtgatgcgcgcctggatgtcctgctcaacgccagcaccgtcaacgatgatggtggcttccttggagatggtcacgcgcttggcgctacccaggttttccagggtggcgctttccaggctcaggccgatttcttcggagataacggtaccgccggtcagaacggcgatgtcctgcagcatggccttgcgacggtcgccgaagcctggcgccttgacggctgcgactttaacgatgccacgcatgttgttcacaaccaacgtcgccagggcttcgccttcaacgtcttcggaaacgatcagcagtgggcggccggctttggcaacggcttccagcacgggcagcatttcgcggatgttggagattttcttgtcgaccagcaggatcagcgggctgtccagctcggcaaccatggtttccggcttgttgacgaagtacggagacaggtagccacggtcgaactgcatgccttctacaaccgacagttcgttttccaggccagtgccttcttcaacggtgatcacgccttctttaccgactttttccatggcttcggcaatgatgtcgccgatggagctgtcggagttggcggagatggtgcctacctgagcgatagccttggtgtcggcgcatggcttggacaggtttttcagctcagcaacgatggcgatggtcgccttgtcgatgccgcgcttgaggtccatcgggttcatgccggcagcaacggccttgtagccttcgttgacgatcgcctgggccaggacggtagcggtggtggtgccgtcgcctgcgtcatcgttggcacgggaggcaacgtctttgaccagctgcgcgcccatgttttcgaaacggtcttccagttcgatttctttggcgacggaaacgccgtccttggtgatggtcggagcgccgaagctcttctcgatgatcacgttacggcctttcgggcccagggtcgcttttactgcgtcagccaggatgttgacaccggtgagcattttcttgcgggcggaatcgccaaatttaacttctttagcagccatgatcgataatccttaaatactttggagtaacgggaaaatgagcggggaaattacgcttccagtacggcgagaatctcgttctcagccatgaccagcaggtcttcgccgtcgattttcacagtgttgctgccggagtaagggccgaatacaaccttgtcaccgactttaacggccagagcacgcacttcaccgttttccagggtcttgcctgggccagcagcgacgatcacaccgtggttggctttttcagcagccgaacctggcagaacgatcccgccggcggttttcttttcttcttcgctgcgacggattacgacgcggtcgtgcagaggacgaagcttgctcattgtcgatctctcctaattgtgtttttcatcggccggtgtctgtaccggcgggttgtattccggctgtgccggtcgcgcctcgccaagcaagacgcggaagtctgtctggtgtcgccaccagaaaccttgcggtgaccgttacataagggcgcataagcttattacaaggggccgcggcggaaattttttgcaggcgccgacggttgaaagcaacacggcacccgaaggtgccgtgccaatgaagcggttatttgctgtcgcggtgttcgaactcgccttcgatcacatccccttcacgccccagcggctggcgtggagccggtccgccacggggttgcaggtcgtcggcaaaggctcgctggcgaatcgccgcctcttcggcgcgctggcgcatcttgccggccagcagcttgcgggtgaacggcagcaacatcaccagacccaccacatcgctgatgaagcccggcaggatcaacaggccaccggccagggccatcatcaggccttcaagcatggtctgtgcgggcagctcgccacggttcaggctttcacgggcacgcagcgccgtggccaggccggcgacgcgcagcaccagcacgccgagcatcgagccgagaatgatcagcaacagggccgggaaaaacccgatcgcgctgctgacttgaacgaatacgaacagctccaacaccgggaacagcagaaagagcaataaaaaagggcgcatcaaatggttcctcaacgcaagaatgccttgccagtccaccttagatgacgtcgccgtttcgtgaattcaagcgtcagcagtggcttttttcggccaggcctcggcatgggccaatgaaaccagggcttcgcgtacttgtgtcggcgtgttgcaaggctccgcaaacggcaaccaatataaggaatggccgatacgcaagtgcatgccttcgctgtcgatgccggctaattgagcgggctcggaagtcggcaaaccgccgagatcgacgtaatgggcaatggccttggtgtgatcgctgttcatgtgttcgatcatgctgcgctcggccttgccggcgaacggattggccaggttcaactggtcgatccagtgaatcgccccaaagccaccgatgtaacggtggcgtacgggcttgagtacccagaagtcgaagtcgtgggccttgtggtagttggcggagtccgggaagtagcggtagtaacgctcggccgccgcctcgatggccgcgccctcctccagcttttccgcttcggccaggtaggtcaggcgcccgacggcctgcacgtcatcggcctcacgctcaccgaccagcaacgaacacttggggtctttctgcaggttatgggtgtgctgtgcgatgcggctgatcaggatcaacgggcgaccctgctcgtcgaggcaatacggtacgaccgagccgaaagggaagccaggcatggctttggataaagtggagagagccccacggtattccttgagcaacagctctcgggcgttcttggcaacctgtgcgctcaacgtatgactcctcgggtattcagccgcccatggcatatgggaatggatctcaacgcaaggtaatcatatccgcaaaggttgccaagcaggttttgtgcgcccgtgttaccaggccacaccgaaaccagcggtgtagcgggtcttgctcaggctgctctcggagtcgccgctgatgatgtcgcgctcggccttgaggttgagggaggcccattcggtgactttgtagcgcaggcccatttccgcatccagggagtaatccacgggcccatcaatcggccggcccagttcaccattggtgaagaactcaaccgtcttgcccaccaggtagcggttgtagttccacttcatggccaccgagtagaagttgtctttgccaccctcggcatattcatagtcagtgcggttgaccagcgaaccgagggagaacgcgcccagttcatcatcccagaactggtagccggggccggtgccgacggtgcgctggcgggacaggtcttcgaccttgtcgcgcttgtaggtcaagcgtccctgccagaaccaatgctcggtgaggaaacggtccaggtcgtattccagggcccagttgtcggtggtggtgacatcgtcctggaactcacggttgtattcgccctggccggtgtggcgccactggccatgccgcgccgtggtcttgaagtcgatgtcgtagtcgttggtgtctttttcggcgcgcttgtagtccagcgccaggtcgacattgcccttccacaccaggtcttcgatcaccggcttgggcttgatgatctgctggatgcttgccaagtccaccgtcttgggcgcctcgccgttggccagcaccaccttgccatcatccgctgccttcagagacttggccttctcgccggtgtaggcgtcctgtttgaccaataattcctggtcgctctccagggttttcacctgcttccagtccacggggatggcaccggcgtagtcggtctggatcagcaatttgccgccatcgaagactttgatcttgccggtcaggcggtcaccgttcttcaaccagacggtgtcggccagcaagggcgtggaggcgctgaaaacagcaaggcacagcagggttctggacaacataagcgggtatggggctcaaggttggcgaaaaggaggcattatcgtgttagatagctaggactgactcaagtatcggggtcgagttcaatgctcatcgccatgtttacagacgtttcttacaaaaatgccgacgatttcaacggatagccgcgcaatgaatcaaccagccgagtcgccgcaaagccctgccgagatgcgccgtactgcgctgtacctgaccctggcacaagtgccaccaggctgcgtggtgagttacggcgagctggctcacctggcgggcctcggccgtgctgcgcgctgggtgggtcgtacgttgagccaactgcctgaagacaccaggctgccgtggcaccgtgtgctgggtgccggtggtcggataagtctgccggtgggcagtgcttcaggcgacgaacaacgggcgcgtttgcgcgacgaaggcgtcacggtccgcaacaatcgcgtggatattcagcgccatggctggcgcccggtagagcacagcggttagagtgcgcgctttgtttccgcaaatctgaggcagactccagcccatgccccgtaaaacctggcgcgccgcgctcgctgcctatgccagcccttcgacgttagtcctgttgttgctcggctttgccgccggtctgccttacatgttggtgttctcgacgctttcggtgtggttgcgcgaagccggtgtggcgcgcgagaccatcggctatgcgagcctgatcggtttggcgtatgcctttaaatgggtctggtcgccgctgctcgaccaatggcgcctgccactgctcggtaaactcggacgccgccgttcctggctggtgctggcccagtcgctggtgatcctcggattgatcggcatgggtttctgcgacccacagaaacacttgtcctggctgatcgctatcgccgtcatcgtcgccttcgcctccgccacccaggacatcgcggtggacgcctaccgcctggaaatcgccgacgacagccgccaggccgcgctggccgccagctacatgtccggttatcgcatcgccgccctgctggctacggcaggcgcactgttttttgccgaagggttcggctccaccggtttcaactacaagcactcggcctggaccggcacctacgtgctgttcggcgtactgatgattccggcgctgctgaccacgctgttcatgcgcgaacctgatgtgccactgcgcacccagttgcaggccgggcgctacagcttcgtacaccaactggcatcggtgtttgtgctgatcgtgctgctggtatcggtaccggcgatgtttacccagttgttcaacacggacttcggcagcgtgatattccacggcgtgagcctgtgggacctgctgatggaagaccgcgccttcctgcgcgccatcctctatataaccctcacgtcgctgtgcctgtcggccatgggtcgccggggtctagcgccggtgctgacaccggtcaacgacttcatcctgcgttaccgctggcaggcattgctgttgttggggctgatcgccacctaccgcatgtccgacaccgtgatgggcgtgatggccaacgtgttctacatcgaccagggcttcaccaaggaccagatcgccggcgtcagcaagatcttcggcctgatcatgaccctgctgggtgcaggtatgggcggcctgctgattgtgcgcttcggtatcctgccgatcctgttcatcggcggcgtggcgtcggctggcaccaacctgctgttcgtgatgctcgccgacatgggcccggacctgcagatgctgatcttcaccatttccctggataacttcagctcagggctggcgacctcagcgttcgtggcgtacctgtcgagcctgaccaacctcaagttctccgccacccaatatgccctgctcagctcgatcatgctgttgctgccgcgccttatcggcgggtattcgggggtgatggtggagaagttcgggtatcacaatttcttcctgatcacctgcctgctgggcgtgccgacgctgttcctgatcgcgttgcactggttccaggaaaatcggcgggcgcggttgagtccaccgaccgaagactgacaatgagggaggggcttgcccccgatagcaggttgtcaggcgcttatgtgttactgatccaccgctatcgggggcaagccccctcccacatacccctctgcgttctgatgcctgtactccagcagccggcgcccgtacaatcccaagtcatttcaagtccaagcaaccgacaacggcctaccatgcgtaccagtcaatatttgctcgccacacagaaagaaacgccttccgacgcggtcgtgatcagccaccagctgatgctgcgcgccggcatgatccgcaaactggcctccggcctctacacctggctgcccatgggcttgaaggtgatgcgcaaggtcgaagccatcgttcgtgaagaaatgaacgccgccggctctctggaagtgttgatgccgagcacccaaccggctgaactgtggcaggaatccgggcgctgggaagagtacgggcctgagttgctgcgcttcaaggatcgccatggccgcgatttctgcgccggcccgacccacgaagaagtgatcaccgacctgatgcgcaacgagctgagcagctacaagcagctgccgctgaacctgtatcagatccagaccaagttccgtgacgaaatccgcccacgcttcggcttgatgcgcggccgcgaattcatcatgaaggatgcctattcgttccacgctgaccaagcgtccttgcaggtcacctacgaccgtatgcaccaggcctactgcaacgtgttcacgcgcctgggcttgaagttccgcccggttgaagccgacaacggctccatcggcggcgccggctcccacgaattccacgtgctggccgagtccggcgaagacgacatcgtgttcagcaacggttccgactacgcggcgaacatcgagaaagccgaagccgtgccacgggaaacttcccgtccagccccggccgaagagctgcgtctggtggacacgccggataccaagaccatcgcggccctggtggaaaaattcaatctgccgattgaaaagaccatcaagaccctgatcgtgcgtgccgaggaagaaggcaagctgattgccctggtgatccgtggcgatcacgagctcaacgaaatcaaggcggcccagcaacctggcgtggccagcccgctggtcatggccaccgacgccgaactgcgcgacgccattggcgccggtgccggttcgctcggcccgctgaacctgccgctgccgatcatcatcgaccgttcggtcgagctgatgagcgacttcggtatcggcgcgaacatcgacgacaagcactacttcggcgtgaactgggaacgtgacctgccggtgccgaccgttgccgacctgcgtaacgtggtagctggcgacccaagcccggacggcaagggcaccctggaaatcaagcgcggcatcgaagtcgggcacatcttccagctgggcaacaagtacagcaaggcgatgaagtgcgaagtgctgggcgagaacggcaagccgatcaccctggacatgggctgctacggcattggcgtatcccgcgtggttgccgctgccatcgagcagaacaacgatgacaaaggcatcatctggagtgacgccctggcgccgttccaggtcgccctggtgccgctgcgttatgaaaccgagcaagtacgcgaagccaccgacaagctgtatgccgaattgacggctgctggttttgaagtgctgctggatgaccgggacaagaaaaccagcccgggcatcaagttcgccgacatggaactgattggcatcccgcaccggatcgtggtcagtgaccgcggcctggcggatggcaatctggaatacaagagccggaccgaagccgaagcccaaccgttgccggtggctgacgtgctgtctttccttcaggcgcgtattcgtcgctgaaaaccagatcaagagaagtcatgttcaagcgaaacaccagagccctggggggcgccgccttgtgcggcgccctgctggtcagcggctgcgccaaccagatgtcgcaacgcagtgagcacgaagagcgagtcgagcgtaagttgctcgaccacagcctgcagatcgatgtaggcgagcccaaagtgctggagctgccgcaacgccgggttcgcattcacgagcagaagaccttcgaggtcaccgagttcgaagtcacccgtcgttacgaccgctataccccctaccagccctggcgcaagctctacgagatgccattgggtgcggttgccctggtggcgggcgcgggtgccaacgtggcgaatatcttcgccctcggccacctgccgaccagcatgacccatgactggctgacctatggcgtggacggcctcaacccgttcatgaacgtgcaatcccacggccgtgcacaacagaacctggcgggtatcgatgaagtccagcgcgacaagcgcgtggagtattcgagcctgccctggagcgagcgcccggtgcaggtcaccgccggcaagcagacccatgagctgaccaccgaccgcaacggcgtcctgcgcctgaacctgttggacagcccatttgccgagcaggacctaaaccgcgtcaccaccttgaagatcagcgtggaagatggccaggacgatgtgcattcggactcgaccctggcgatcagcaacaccctgcgcggcaagttgctcgaagcccacggtttgatctacgacgatctggaagacgatgaagtcagccagtgggtgcaccgggtcaagcgcttgtcggagctgggcctggaagaagaggccagtgagctggagcaaagcctgatcgaactgacgcgcaatgatcccgagttgcagcaagagtttctgcaggcgctgaccaaggatgcggggcggctagtcgcagatcccggcgcacgctgagcccctcaaattgttgccggtcaaatgtgtgagggggcaagccccctcccacatttgctcccgatttttaccaggaaaattcgagctgctcgttgccattgctcaggtccaacaaccgcacaccaatccccaacaagcgcaccggcttgcctccgcggttgaacgcctgcgtcagcagctgttgataactctctagatcccgccctgccccagcctgttccagtgtggtctgggtaaagtcatgaaacttcaccttcacgaacggcttgcccgccctgtaactgctatcgatgcgcgccatgcgcccggccagggtttccatcagttcgggaagtttggccaggcagcttgagaggtccggcaggtccacgtcataggtattttccacactgatcgattgtcggcgactgtcgttctgcaccacacggtcatcgatcccacgcgccaggctccacagccgctcgccaaaactgccgaattcgcgcaccagcgccagcttgttccactcgcgcagttgcaggcagtcttcgatgcccaggcgtgccagtttatcggccgtgaccttgcccacaccgtgcaacttgctgacccgcaactgtgagacaaagtcttcgacctggtccggggtaatcacaaacaggccgttgggtttcttccagtcgctggcgatcttggccaggaacttgttcggcgccacgcctgcggacacggtgatgtgcagttggttggagacacggcgacgaatgtcctgggcgatgcgcgtggcgctgccgccaaagtgcgggctgtcggacacatccaggtaagcctcgtccaacgatagcggttcgatcaggtcggtgtagtcgcgaaagatcgtctggatttccttcgaggcttccttgtaggcgtccatgcgtggcttgacgatggtcaggtccgggcacagcttcaaggcatgccgcgacgacatggccgagcgcacgccataggcgcgcgcctcgtagttgcaggtggcaatcacgccgcgccggtccgccgagccgcccaccgccagcggtttttgcgccaggctcgggtcatcgcgcatctcgatggcggcgtagaagcaatcacagtcgacgtggatgattttgcgctgcgtcatataaacggggtgtgtacctacgggtggccagtatcgcattcacacctgtatatagcaccagtagtttgaatcttccgctcaagcggtaggaaaattccaggatgaatttattttctcaatcggatttggccttccgatagagctgaaagcctcggccagactgggcccgcggggtatcaaggggcctttatggagagctaagcgattgaaccacaagcgcttttctttaattcacaggttgacagaccggcgttcctctgtagaatgccgacacacagacgcgggatggagcagtctggtagctcgtcgggctcataacccgaaggtcgtcggttcaaatccggctcccgcaaccaaacatcaaaaaaggctactcgaaagagtggccttttttgtgcgtgcctgttttgtcctgtacgaaaattgtaagacaaaaaaatctttgcccttcgcgcacttacggtgcatggccgacattcaacggctaattcacacttatttgacccatcggctcattaacggttgacacctcggcgctgaactgtagaatgccgcccacagacgcgggatggagcagtctggtagctcgtcgggctcataacccgaaggtcgtcggttcaaatccggctcccgcaaccaaacctcaaaaaaggctactcgaaagagtggccttttttgtatctggtgaaaaagttcttctgaaacaatggcatggcatctttcatgaaaccgcacacggtttgtagagtccatctcattgcaagctatgctcaatgctcaagcgctgccctctacgaccaatggccgcagtcgccgcccccggcgatacgcgttaatatttgtaattattttgtccatagggattggtaacttggctggatacctccatcctgtcgcgcacaatccacgaggtgattgatgcgcgccaactcgtctgaaccacaagacaccgtcacagcagaacaaccgatcacacccacccgcttgcgctggctggatctggtgagcaagtaccggcaacctatcgggctggccgtcaccttattgctgtttgccattgccctgatcgcctgccgccacctgctgctggagctggacctctacgccctccacgactcgatcctggaagtgcccaagccggccctgctcggtgcgtttgccgcagccattgccggttttgtcattctattaggctatgaattctccggcgcccgctatgccggcgtaaacctgcccgccaagaccctggcccttggcggctttaccgcattcgccatcggcaatgccattggcctgtcgatgctttccggcggatcggtacgctaccgtttatatgcacgccatggcatcggtgcatccgaagtcgcccatatgaccgtgttcgccagcctggcgctgggcactgccctaccgccactggctgcattggcaacactgagcaacctgcccgccgcatcgacctacctgcatttaccgcaagcggtgctgggcggtattgccggcgcggtgctgctgttgtcggcggtgttgtgcatcggcatttatcgccgtcgcctgccggagcaaccctacccggacaacctgttggtcaaagccggccgccgcaccttgcgcctgccgggccgtcgcctgaccttcctgcaactgatcattaccgcactggacgttgccgccgccgctaccgtcctttatatgctgttgcccgaggctccgcccttcggccccttcctgctcgtgtacctgctggcgctggccgccggtgtactcagccatgtaccgggcggtgtgggtgtattcgaagcgatcctgctggcagccttcgccgacaaactgggcgccgcgccactggccgccgccctgctgctgtaccgcatgatctacgtggtgctgcctctgctgatcgcctgcgtgttcctgctggtcaacgaagcgcagcgcctgttccagacccagcaaagcctgcgggtcgcctcggggctggcggcgccagtactggccgtcctggtttttctgtccggcgtggtcctgctgttctctggcgccacgcccgaaatcgactcgcgcctggaaaacatcggcttcctgattccccaccgcctgattgacgcctcgcactttggcgccagcctgatcggcgtgttgtgcctgctgctggcccaaggcctgcgtcgacgcctgtcggccgcctggatgctgaccatggtgctcttgctggcgggcgccctgctctcgctgctcaaaggcttcgactgggaagaagccagcctgatgaccatgaccgcgatcctgctggcgatcttccgacgctcgttctatcgcgccagccgccttaccgagctgccgttctcgccgctgtacctggtggccagtgtctgcgtgctcggggcgtcgatctggctgttgctgttcgcctatcaggacgtaccgtacagccatcagctgtggtggcagttcaccctggacgccaacgccccccgtggcctgcgctcgctgctcggcgccgccgtgttgctggtgatcgtgtccctgacctggctgctgcgtaccgcgcgcccggtgatccatttgccgacacccgatgaactggagcgcgccagcaaaatcctgatggcctcttcacagcccgacggcggcctggcgctcaccggcgacaaggcgctgctgttccaccccaacgacgaagccttcctgatgtacgcccgtcgcggtcgcagcctggtggccttgtacgacccaatcgggccaacccaaccccgcgccgagatgatctggcagttccgtgacctgtgcgacatccaccacgcccgcccggtgttctaccaggtgcgtgcggagaacctgccgtactacatggacatcggcctcaccgcgatcaagctgggcgaagaagcccgcgtcgacctgaaacgctttgacctggaagccaagggcaaagagatgaaggacctgcgctacacctggaaccgtggctcgcgggacggcctgtccctggagatctgcgaaccgggcaccgcgccgatggacgagctcaaggtgatctccgatgcctggctgaccggcaagaacgtgcgggaaaagggcttttccctgggacgcttcagcgacgactacctcaagcacttccgcatagcgatcattcgcttcgaagggcgcccggtggccttcgccaacctgctcgagacctacaaccatgacctggccagtctcgacctgatgcgcgcccacccggacgcgcccaagctgaccatggaattcatgatggtcggcctgattcaacattataagagtcacggctacgcccgcttcagcctcggcatggtgccgttgtcgggcctgcaaccacgacgcggcgcaccgctgacccaacgcctgggctcgatggtgttccgccgtggcgagcaactgtataacttccaaggtttgcgccgcttcaaagacaagttccagcctgactgggaaccccgttacatggccgtgcccgcaggacttgatccgctggtggcactggccgataccgccgccctgatcgcgggcggcttgactggattggtgaaacgctgatgattcgacgctcctggcggtatgtattggcctttgtagtgctgctcgccctgttcctgggtggcggctattggtactggaaccgccctgccccacaaccggtgctggagcaactgccccaggccgacggttcggtcatgacccgcgtgacccccaacggcacgccaaaagcccgcgtggccgtggccgtgatggccgatgaaaccctgaccgacagtcaactgattgccttgagccaaggcggcaaggcgcagattgtccaggtgatcctgcccaaggatgactgcaaactgcaggaacaagcgctgcaaagcgccctgggccagctcaagggcccggcgacgctggttagtggcatcggccccggtgcaagcctggcctggcgctggctggcggcacagaccgacgacaaggccaacgccatctccgtcggcttcgccatgacccagccaggctgcaccgacccgctgccgaaaacctccgcccacggcaactggctggtggcctggaacgacaaccctgaggatgacgccgccagtttcgtccgtgacacaccgcgtgccaccaccagcatcagtgactacgacattcattacccgcaagtgctgaacaacgagttgcgcaagcaactggtgggctcggacaacggcggcctggcgattccggtggttgaagtaccggccggccaggccaaggacactgtcaccctgttcctgtccggcgacggcggctggcgcgacctcgaccgtgatgtggctggcgagatggccaagatcggctacccggtggtgggcatcgacacgctgcgctactactggcagcacaaaaccccggaacaaagcgccaaggaccttaccgagctgatgcagcactaccgtcagaaatggggcaccaagcgcttcgtactgaccggctattcgttcggtgccgatgtattgccagccatctacaatcgcctgccggagaacgagcagcagcgtgtggacgcaatcatcctgctggcgtttgcgcgtacgggcagcttcgagattgaagtggaaggttggctgggcaatgccggcaaagaagccgccacgggcccggaaatggccaagctgccggctgacaaagtggtgtgcatctacggcgccgaagaagtcgacgagagtggctgcacggacaagacggccgtaggtgaagccgtcaagctgccaggtgggcatcacttcgatgagaactacccggcgctggccaagcggttggtggatatcatcgtgaaacaccagaccaaggataaagccgagtaactccagctattacatggcttaaaatgtgggagggggcttgcccccgatggcggtgggtcagctacagataagctgactgaagtgccgctatcgggggcaagccccctcccacatttatatttgcaatgttgtttagattcagcgcggttcgatatgcgcgatcatcaattgcacggtttcattcccgcgaaactcgttcacatccagcttgtaggccagctccacccagcgcaccgtcgggttcggccagatctcccggtccaccccaaacgcaatgccatcgagcttcaccgagccgcattcgctcttgagcacgaccttcaagtgccgctcgcccaccacgcgctgctccaccaactgaaacacgccgtggaacaacggctccggaaagtgctgcccccatggcccggcatgtcgcaacgcgcgggccagttccaagtgaaactcttccaccgccagtgtgccgtctgacagcagacgaccggtcaggtcttcttcgcgcagttgccgacgcacttcggcatcgaaggcttcggcaaacagcggaaagttttcctcgggtaatgtcagcccggccgccatcgcgtgaccgccgtatttgctgatcaggttcggatgctggctggcgaccaccgccagggcatcacggatatgaaaaccctgcacagagcgcccagagcccttgagcaaaccgtcgccagcgtcggcgaaggcaatggtcgggcggaagtagcgctctttcatgcgcgacgccagaatcccgatcacaccttggtgccattccgggtcgaacaggcacaaaccgtagggcatcgactccaccggcaagtccttgagctgggccagggcctcgcgctgcatgccttgctcgatggatttgcggtcctggttcatgccgtccagttgcgcggccatttcacgggcagcggccacgtcggtggtgagcaggcattcgatgcccaggctcatgtcatccaggcgtccggcggcgttcaggcgcggcccgaggataaagcccaggtcggtggaggtgatacgtgcggcgtcgcgcttggccacttctaggatcgccttgatccccggccgtgcacgaccggcgcggatacgttccagcccctgatgcaccaggatgcggttgttggcgtccaggggcactacgtcagcgacgctgcccagggcgaccaggtcgagcaactcgccgatgtttggctgtggcttgttctcgtaccagcccaaactgcgcaggcgcgcacgcaaggccatcagcacgtagaagatcacgcccacgccagccagcgccttgctcgggaattcacagcccggctggttcgggttgacgatggcatccgccgccggcaactcgtcgccgggcaagtggtggtcggtcaccagcacctgcaaccccgccgctttcgccgctgccacgccttcgacgctggagatgccattgtccacggtaatgagcaactgcggctcgcgctgcaaggcaacggcgacgatttccggggtcaggccgtagccgtattcgaaacggttgggcaccaggtaatcgacatgggccgcgccgagcaagcgcaggcccaaggtgcccacggtgctggcggtggcgccatcggcgtcgaagtcaccgacgatgaggatgcgttggcgttgctccaatgctgtcaccagcaggtcgaccgccgcgtcgatgcccttgagctgctggtagggaatcaaccgcgccaggcttttatccagttcggcctcggacagtaccccgcgcgcggcgtaaagacgggtcaacagcggcggcaattcaccaagaaacggcaggacggcgggcaacgggcggggatcgatacgcatggggtgacggatacttctcttctgatacggaaataaaacaggtgaccggcggcgatccaatcaaccgcgttcgccaaccagccactgcaactgcacttcatgctggccgcggtcgtcggtgacgaagatcgtgccttcgctgatcatcacatcccacttgataacacgcggcatgtccttggccagggtctcaaggacttcctgcggcacggcggcgatgtgtacgtttttcaggttgttcgccaccggcaccaccttgccttcccacacacgcaggctgccgtaggccagcaggctggtgcgttcagtgcggcgcgagcaccaggtgaggcggtccgcatcgggctggccgacttcgatccagtgcaacacccggtcatccaggcttttttcccacaaggctggctcgtctacatctgataggccacgtccgaacgacaactgctcgttgtaccagagggcgtaggccagcagacgcacggtcatgcgctcttcggtttccgacgggtggcgggcgatggtctgtttgacgctctcgtacaccgagcgatcgaggtcggtgaggttgagttcgaatttgtaggtcgtggacggctgggccatgaacgggcttctagagacagggaaaggcggccagtctaaccgatgacgaggccaatcaacgaatccagcgctgccctgggctgctcgcctatgttaaaaggcatcacaccaccgccctgcgcagacaaggatcctcatgtcgttcaatgccaaaccacttgccggcctgaaagtcatcgaactcggcaccctgatcgccggcccgttcgcctcgcgtatctgcgcggagttcggcgccgaggtgatcaaggtcgaatcaccggacggcggcgacccgctgcgaaaatggcgcaagttgtacgagggcacttcgctgtggtggttcgtgcaggcgcgcaacaagcagtcgctgacgctgaacctcaagcacccggacggcctggccatcctcaaacaattgttggcggacgccgacatcttgatcgagaacttccgccccggcgtgctggaaaagctcggcctgagttgggagaccctgcacgcgctgaaccccaagttggtgatggtgcgtctctccggctttggccagaccgggccgatgaaagaccagccagggttcggtgcggtgggtgaatccatgggcggcctgcgctatatcaccggtttcgaagatcgcccgccggtgcgtaccggcatttccatcggcgactcgattgccgcgttgtgggcggtgatcggcgcactgatggcgctgcgtcatcgcgaggtcaacggtggcctgggccaggtggtggatgtggctctgtacgaagccatcttcgccatgatggaaagcatgatcccggagttcgacgtgtttggctttattcgcgagcgcaccggcaacatcatgcccggcatcacgccctcctccatccacaccagcgccgacggcaagcatgtgcagatcggcgccaatggcgatgcgatcttcaagcgcttcatgtcggccattggtcgtgaggacttggccatcgatccggtactggccagcaatgacgggcgcgacagccgccgtgatgaactgtacggcgtgattgatcgctgggtgaactcactgtcgctggatcaggtggtagaaattctgaataaagccgaagtgcccgccagccgcatctacagcgccgaggacatgctcggcgacccgcaattcctcgccagggaaatgttcctcaaggcccagcttcccgacggcaaggaattcaagatgccgggcatcgtgcccaagctgtcggacacgccgggcagttgcgaatgggtggggccgcaactgggtgaacataacagcgtagtgctcggcgggctgggttacgacgctactgccattgtgcgtctgcgcgaggaaggcgcgatctgatggcccgtcgggttactcagttgtgcctcgccgtcatgatggcgagcgcctggcctctgccggccaatgccgaggacacgctgatctggcttttgcgtgatttaccgccactgaccattttcgaaggcccgcgcaaaggccagggtgcgctggaccaactgctgccgaaactgatcgagcatctgccggaataccggcaccaggtactgcacgtcaatcgcgcacggggtacacaaatgcagcgcgagcccacattcacctgcgacccttcattgctgtggaccgccgagcgggccaggtacgtggtgttttccaggcaggcctttgtggtcgccagcaatgggatcacgatccggcgcagccagcagcaagccatggccgactatatttcggaaggccagtttgacctacaggccttgctcgacgcgcataaggcacgggtgggggccactgcggagcgcagctacggtcctgtcatcgatgcacagctcaagcaggccgacacgcactcactcgcgctgcattacggtaacgatgcactgggcagcctgttacaaatgcagcgcctggggcgcttggaggccgtgctgggttactggccggagatccgctaccacgcgatgcagcaaggcatcgcctcggatgacctgagcttctatccgatcaaaggctcggcgccgtatcagcgtacgcacatcggctgctcggatacgccccaggggcgccaggccatcaaacgaatcgaccagatactgcgcgagatcccgctggaacaagtgcagcagtcgtatacctcatggctggacccggtcatgcgcacccattacctgcgggataacccgagttttttccaggactcgccagagccgtgacaaatcgcaggcaaaaagaaaccccaaagcgtggggagacactttggggttaaacgtggcctacaaagaccagtacagcaaggcacaaacaccggagcacaatgtttgctcttgctgttacaaaatctgaccggccacgctgtaggaagtttccacagttaaacaattcttcatgcggcggtggcgttgcgagtctgggctgcgttgcgcaaggctgctatgaccgagggttccagacgtccttcggcaattttgatgtcacgcagcaggcaatccactacatccaccagcacgcgcttgtccatcaattgggcgcggtcgacgtcacgctcgaccacgatggcgccagcaggattcttaacggttaccaggcactcgtcctgcacaccagaggtggtcagcgtaacctgataagggctcagtgcttcttcgagcaataggctgatactttccatctcgatcaccactcaatagttcgggaacaatcgtttcaacgggagctgcatctatcctaagtgactgtttgtgacgtaggaaagttcgctttatcgtctttatggggccgtcagggggtgacggattccagcatgcgcttgcaacatgacaacgaaaaaacggccgcacataagtgcttacgcaatgggcggcttttttgggggttccgggcgttgaggcccaaggtgaatcctatactcggtgggcgctgatcactttgccttgcaggcaggagcgcatgtcaaaaggcccttattgcgaaggataaatacgatgctggaacacgataaagagcaagctgcgctagagaagattcacgccgacatatcacgcatttatgcggagcaacgcaaactcactgccgagacacacaagataacccgtgagaatttctggtatccattgggtgtcgtcatggccatgtttacggcgttcagcactgtcttggctatcgtacagaaactactcacgtagccgcgtataccaagcggggcctgccagaaacgaaaaacgccgctgccccaggaagggaaagcggcgtttttgtctacgcggtgtgccttacaacggcttaccccggttgccatgctggctcacaaacgcctgtacggccttcaggtcattggccaacaccgtgcaacgctcttcacgctcgaacaggtcagccaggtgcaccggcaactccagcgccttgccaacaccggccttctccaccgcttccgggaatttcaccggatgggcggtgcccaggatgaccatcgggatatccaggctgcgacggcagtcgcgggcggccttcacgccgatggcggtgtgcgggtcgagcagctcgccggtctgggcatagacttcagcgatggtttcgcaggtctgcgcgtcgtccacggccagggagtcgaacagcttgcgggtttcggtccagcgctcttcatccacgctgaaaccgccgccgctcttgaaggtgtccatcaagccggcaatcgccgcaccgttgcgaccgtgcatgtcgaacagcaggcgttcgaagttcgacgagaccatgatgtccatggacggcgacagggtcgcgtgcagggtctccttgacgtactggttgccgctcatgaagcggtgcaggatgtcgttgcggttggtggcgacgatcaattggttgatcggcaggcccatgttgcgcgccaggtaaccggcgaagatatcgccgaagttaccggtcggcaccgagaacgacaccgaacgcgccgggccgcccaactgcagcgaggcatgaaagtagtagacgatctgggccatgatccgcgcccagttgatcgaattcaccgccaccaggcgtgtgcccttcaggaagctctggtcagcgaagctgttcttgaccatttcctggcagtcatcgaaattgccttcgatggcgatgttatggatgttctcgccgaagatggtagtcatctggcggcgctgcacttccgacacacgcttgtgcgggtgcaggatgaagatgtcgacgttttcgcagtgcttgcaaccttcgatggccgccgaaccggtatcaccggaggtggcaccgatgatcaccacgcgctcgccgcgcttctgcagcacgtagtccagcagacgccccagcaactgcagggcgaagtccttgaaggccagggtcgggccgtggaacagctccagcacccactcgttaccattcagttggcgcagcggtgcgatggcgttgtgggaaaacacaccgtaggtttcttccagaatctttttaaagtccgcatccggaatgctgccggtgacgaacgggcgcatcacccggaaggccagttcgtggtacggcaggccggcccaggaagcgatctcttcctgggtgaagcgtggcaggttttccggcacgtacaggccgccgtccgtggcaaggcctgccagcaggacgtcttcgaaattcagggccggtgcctggccgcgggtactgatataacgcatgactggctcctctagagcattcttgaacaagggccgccgaacttgcggggctcttgccgcaaaaccattagttcaggtgttcgacgcgaatccgtaccaccgggccgaccacgccttgcagggcttccagggcagcgatggcatcgttgatgtgctgctcgagcacgcggtgggtcagcaggatcatcggcacctggccgttttgctcctcgacttccttctgcatgatcgactcgatgttgataccgcgctccgacaggatgctcgccacttgggccaacacgcccgggtggtcctgggcctggatgcgcaagtaataggcgctttcgcaggcttcgatcggcaggatcgggtgagccgacagcgagtccggctggaacgccaagtgcggcacacggttttccgggtcactggtcatcgcacgcaccacgtccaccaggtcggcgatcaccgacgaagcggttggctccatgccggcacccgcgccgtagaacaacgtggaaccggcggcgtcaccgttgaccatcaccgcgttcatcacgccattgacgttggcgatcaggcggtcggccgggatcagcgtcgggtgcactcgcagttcgataccggccggcgtgctgcgcgccacgcccagatgcttgatgcggtagcccagggcttcggcgtagttcacatcggccgtggtcagcttggtgatgccttctgtgtaggctttgtcgaactgcagcgggataccaaaggcgatggacgccaggatggtcagcttgtgcgcggcgtcgataccttccacgtcgaaggtcgggtcggcttcggcgtaacccagggcctgggcctcggcgagaacgtcttcgaaggtgcggcccttctcgcgcatttcggtgaggatgaagttgccggtaccgttgatgatgccggccacccagttgatgcggttggcggacaggccttcacggatcgccttgatcacagggatgccaccggccactgcggcttcgaatgccacgatcacgcccttctcacgcgccttggcgaagatctcgttgccgtgcacggcgatcagcgccttgttggcagtgaccacgtgcttgccgttctcgatggccttgagcaccagttcgcgggcaacggtgtagccacccaccagttcgatcacgatatcgatttcagggttggtggccacggcgaagacatcgttggtaatcgcaataccggtcgtttcgaactgaggctttggcgaacgcgtggcaatttgcgccacttcaatcccacgccctgcacggcgggaaatttcttcagcgttacgctgaagtacgttgaaggtgccgccaccgacggtccctaacccacagatgcctactttgaccggtttcactgaagaactccccatgaaacggccgacgcgaggtcggccgtggaaaacagccgcacgactgcggctttcaattaacggcctgtcgacttatccacaggccatgatcgtcaaaggttcgacgatgctggtttatttggcactcagcgccagtttcgcaacttgtggtgccggctggtagcccggaatcacctggccgtcagccaaaacgatggccggtgtaccgttgacgccgatggactggcccaacgcgaactgcttggagaccgggttggcgcatttggcggccttgatttccttgccgtcgaccatcttgtccatggccgcttttttgtcggccgagcaccatacggcttgcagctgctcgtcacccggcgaacccaggccctggcgcgggaacgccacgtagcgcacttccacacccagtttgttcagcgcaggcacttcggcgtgcagcttgtggcagtacgggcaggtggtgtcggtaaacacggtgatgtgggtcttggtctcgccgatggctgggtaaaccacggtttcagccaccggaataccattgatcagcttggaaacacccaggcgttcggctttctcggtcaggttgaccggcttgccgtccttcaactggaacaggtagccctggacgatgtactggccatcggcactggcatacagcacgcggctacccttgagcttgacttcgtacaggccggccatcgggctggcgctgatgctctcgatcggggtgtcgagctgcaggttggccaggcttttgcggatggtctgctcggcggcgtcatcggcaaaggcaaaggtggaaaccaacgcaatggctgcggcggcaataatctgggtcaagcgcatgggaactcctgaaggcagatgcagggacgggcagtaacactgcttggaaacacaggtctgggtcgtcccctttgctaaccggcaaagcctaccacagttgggccgcagggcagcccgtggccggataaattggacgttttcagcctcgcgggtggtgcttggcgtgcatatcctgcaaacgcgcgcgggccacgtgggtgtagatctgggtggtggacaaatcgctgtggccgagcagcatctgcaccacacgcaaatccgcaccgtggttgagcaaatgcgtggcgaatgcatggcgcagtgtgtggggcgacagcgccttgccgatcccggcgaccttggcctggtgcttgatgcggtgccagaaggtctggcgagtcatctgctcgccacgcaaactggggaacagcacatcactgggccgtccaccgagcagttcgctgcgggcatcgcgcatatagcgctcgacccacacaatcgcttcctcgcccatcggcaccagccgctccttgctgcctttgcccatcacccgcaacacgccctggcgcagattgacttgctccaaggtcagactgatcagctcggtcacccgcaggccacaggcgtagagcacttcgagcatggcgcggtcgcgctgaccgatggcctcactgaggtcgggggcggcgagcaaggcctccacgtcggcttccgacagggatttgggcaacggtctgccaagttgtggcatatcgacttgcagggtggggtcgagggcgatcagcttttcccgcagcagatagcgataaaaaccacgcacgccggagaggaatctcgcggtggaacgtggtttgtagttctgttccaggcgccaggccaggtggtcgaggatcagctcacggcccgcgttgatcagtgcgaggtttttctcctgcaaccagccgttgaacagcgccagatcgctgcggtaagcctggcgcgtgttgtccgacaggcctttttccagccagagggcgtcgagaaaacggtcgatcagggggtggtcaatggcaggcatagaggctcgaataaaaaagtgggagaggcaggtagcatcctatctcggacctcaaatcgcaggcacaaaaaagcagcccgtaggctgcttttttctgcatcgggaagctggacttaagccagtttttccttgatgcgagctgctttaccggacaggtcacgcaggtagtacagcttggctttacgtacgtcaccgcgacgcttgacggccatgctgtcgatttgcgggctgtaggtctggaaagtacgctctacgccaacaccgttggagattttacgaacagtgaaagcactgttcacaccacggttacgcttggcgattaccacgccttcgaacgcttgcagacgcgaacggtcgccttccttcactttcacctgaacgacaatggtgtcgcccggggcaaaggtagggatctctttggtcatctgctctgcttcgagtgcaaggatgattttgttagtcatgctgtgctcctaaggtaagtcaatggacctaccatcgatacgttgttaactatcgtcccgcgcgaggatgtattcctcgagcagcttcttctcttctccagaaagcgagcggctttccagaagatcggcgcgtcgttcataggtccgaccaagggactgctgtaaacgccaacgccggatgtgtgcgtgattgccacttagcaatacgtcgggaacacgctgatccgcatacacctccggtcgggtgtagtgcgggcaatccagcaaaccatccgtgaaggaatcttcctccgcggagtccgcatgccctaaagctccaggcagcagtcgtgtaaccgcatctatcaggaccatcgctggcagctcgccgccagacaggacatagtccccaatcgaccactcttcatcgacatgagcttcaataaaacgctcgtcaatgccttcatagcgaccggcaatcaggatcagtgcttcctcattcgccagttcgcggaccccagcctgtttcagctgacggccttgaggggacaggtaaatcaccttcgccttctccccggcagcgaccttggcctgaaccaacgcgtcttccaggggcttgatcttcatcaccatgcccgggccaccgccaaatgggcgatcgtccacagtgtgatgtcgatccgtcgtgtagtctcgcggattccaacaggtaagctgcaacagcccctgtttcaccgcccgactggtgatgccgtactcgctgatggcggaaaacatctcgggaaacaaactgatcacttcaatgcgcaaattagccacgcttagaagtccgcgtcccattccaccttcatctcgcccgctgccaggtcgacggccaacacgcattgctcggtatagggcaacaggcgttcgcgatcatccaggctgccagcgcaaggcttgaccaccattacatcattggcgccggtttccagaagatgatcgattttcccgaacagttgcccgagttgatcaataaccttcagaccttccagctggtaccagtagtactcgccgtcggtcaattcagggaacaggttgcgcggcacgcagatctcataaccggccagaagacgagcttcttcacgatcatcaagacccttgagctttgcgaccaggaacttgtcgctcccgcgtccactgaccagctcgacctgtttcacactaccctcgcgcttgagcgtccaggttttgtactgcaacaggttttcagtcggatcagtaaaggaatacaccttcacttcgccgcgaacgccatgaaccgagtaaatcttgccgataacgatcaaatcatcagcaacagctggcgtcgcgttcatattgctcaggctgcggccttagccgagtccttcaacagttttgcaacgcgctcggatggctgtgcacccacgctcagccagtaggctacgcgctcttggttcacggacagacgaacttcttgaccacgagcaacagggttgaagaaaccaacctgttccttgtgcgaaccgtcgcgcgggttgcggctgtcggttacggtcaagtggtaaaacgggcgctttttggagccgccaagggcaagacggattgttagcatgtgaacatcgttcctgtagtcggtgctgcaaatctaaatgcacagcgggcataggtgcccgaaaggccgcatattctaaggaatatccggacttttgcaaatgtctttttctggcgcctatcagcgtgccattcagatctgctatagagccgtcggttaaaacggcgagtcagcgcccgccaacggcgggtttgctggagatcccacatccctgtgggtcggagcaggagctgggctcccgctcgaattctttacatcttgggcatgccaccgccgggcaacataccgcccatgccgcgcatcatcttggccataccgcccttggcggagaatttcttcatcatcttctgcatctgcttgtgttgcttgatcaagcgaccgatgtcctgcacctgggtgccggaacccatggcgatccgacgcttgcgcgaaccgctgatcagctcagggtcgcggcgctcggccggggtcatggagttgatgatggcttccatctgcttgaactgcttctctgccgcgccctgggcattgcccatctgcgccaggttcacaccgccgatgttcggcagcttgtccatcaggccgccgaggccgcccatgttcttcatctgttgcagctggtcgcggaagtcttcgaggtcgaagcccttgcccttcttcagctttttagcaagcttgtcggccttgtctttgtcgagggtagcttcggcctgctcgatcaggctgagcacgtcgcccatgccgaggatgcgcgaggcgatacgctcgggatggaacggttcgagcgcttcgctcttctcgcccataccgatgaacttgatcggcttgccggtgatggcacgtaccgacagcgcggcaccgccacgggcatcgccgtcgaccttggtcaggatcacgccggtcagcggcagtgcgtcgccgaaggccttggcggtgttggccgcgtcctggccggtcatggcgtcgaccacgaacagcgtctcgaccgggttgatcgcggcatgcagcgccttgatctcgcccatcatctcttcgtcgatgtgcaggcgaccggcggtatcgacgatgaccacgtcgatgaacttgagcttggcttctttaatggcagcgttggcgatgtcgactggcttctggctcaggtcggacgggaagaaggtcacgcccacttcgcccgcgagcatttccagctgcttgatagcggccggacggtacacgtcggccgacaccaccatcacggacttcttcttgcgctctttaaggaagcgcgccagcttgccggcggtggtggtcttacccgcaccttgcagacccgccatcaagacgacagccggcggcaccgcactgaggttcaagtcttcgttggccgcgcccatcaggctttcgagttcggcctggacaatcttcacgaacgcctggcccggggtcaggctgcgggacacttcggtgcccaccgcgcgctctttgaccgagttgacgaagtccttcaccaccggcaaggccacgtcggcttccagcaacgccatgcgcacttcacgcagggtgtctttaatattgtcctcggtcagcttggccttgccggtaacgtggcgcagcgtctgcgagagacggtcagtcagattttcaaacatgcgcgatcctttcaggccctattcatagaccgaggtaatggcggcccaggctgtggtaaatcgctattaaaaacagcgctcggcgagcctgcggcgtgggcaggtcgcggattatagcgaagactgcgcccatgcacacccgctgtctggcccgggagtctttcgtgttgcgcgggggtatgccaaactcagcgcctttcgggcttgcctaacaggatttatgctccctttgtcacccagtttgctacccagcctcgccgccgccatcttgtacgccgctgcgaccgtctatcagggcactcgtctggcccagggcaccaaggcggacaaacgcctgttggtaggccttggtgtcctcgccttgctcgcccatgcggccagcctgttcacgcacttgatgacgccggtcggcctggccctggactttttcagcgccgccagcctgatcgcggcggccgtcatcgcgctgaccctgatggcctgttaccggatcccggtcgaaaacctgctggtgctgctcttcccgctgggcatgctgacggtgctgctggcgcaattcgcgcctaccggtacggtgccggtgatcgatgaagagccgggcatcctcgcgcacatcctgctgtcgatcctggcctatggcatgttcaccatcgcggtgttccaggccctgctcctgctgctgcaggaccaccagctcaagcacaagcatccgtccgggctgatcaagaacttcccgccactgcaaaccatggaaagcctgctgttcggtttcctgtgggccggctggaccttgctctcgctgtcgctgatctccggctggctgttcttcgaaaacctgttcgcccagcacctggtgcacaagaccctgctggcctgcctggcctggatcgtgttcagcgtcctgctgtggggccgcaaccgcctcggctggcgcgggcacaaggcgatccgctggaccctggccgggttctgcctgctgatgctggcctatttcggcagcaagctggttcgcgaatacatcctgcatatctgacgggcggcgatcatggacaacttgcccctggagccgatgctcgcggtaatcgccctgctggtgttgtgggccgcgctgttcaccgccatcgaggccgcccagcaacatttgctggccctgcgccccggtacacgccagggcgacaaggcggccacccgcctgagctttccgcgtaacagcctgatcctgtgcaacagcctgtgtcgcgccgccgtggtcatcctgtgcacgctgctggccatatacgcctgggcgcagaacgggccgtggctcggctggctgatctcctgcgcgatcctgctgatactggccgactacctgccccgcgccctggccacccgctatccgcaagcggtactgggcttcggcaatacgctgctgggcgtgccactgaaaatcgtctaccccctggcctggctgctcaatggtattagtctgttgctgcttcgcccgttcgcgcgcaagaccggcgtggtgaagaagagcgacgaaccgctgcctgaccatgatgacgaacccgagcccgagatcgccgaaggccgtacccccggcatgccgggcatccatgctctggacaacatcaccgtcaacgacatcctggtgccccgcagcgaagtggacggcatcaacctggatgactcgatcgaggagatcatcgagcagctacgcacctcccagcgcacgcgcctgccggtgttccacagtgatatcaaccaggtcgaagccgtgctcaacacgcggcagatccagcacctgttgcccgacgcgagcctgaccaaagaggcgttgctcgcagcctgccacgagccttacttcgtcccggaaagcactccgctgcaactgcaactgctgaatttccacaaacagcagcgccgcctgggcatggtggtggatgaatacggcgaagtactcggcatcgtgaccctggaagatatcctcgaagaaatcgtcggtgaattcgaaagcgaacagagtgcggacaacccgcatatcgaagcgcaaccggatggccgctacatcatcgacggcgccgcctcgatccgcgaattgaacaagagcctgaactggcacctgcccagcgacggccccaagacgctcaacggcctggtcaccgaagcgctggagaccattccggattgcgcggtgtgcctgaaaataggccgctaccgcctggaaatcctcgagaccgaggacaaccgggtgagcaaggtgctgatctggcataccagccggatgccggtcgccgcttaattcgtaatcaaataatgtgggagggggcttgcccccgatggccgagtgtcagtcaccgcatcaagtggctatacacagctatcgggggcaagccccctcccacattttgacttgttgtatgttcaaaccccttcctataatcgggacggcttaccagagccctgcccgaccgcgtgctacccgcactgaacgcgtccaggcaccgttaaaccgcgtctgaccggtgttcgctcccatcccgagccgccccgcgcgctaccctgatccatgggagttcgaccaataataatccgcgtccaaacgcgcaatgaccgtcagggataccaccatgagcaccacctacaacgaggccgcgcccgccgctgccccgaccaactcgaccgcacgtgtcgccacggcgagcatcgtcggcaccgccatcgagttctacgatttctatatctacgccacggccgctgcgctggtgatcggcccggtgttcttcccgcagacttccggcaccgcgcagatgctggcgtcgttcctgaccttcggtatcgccttcatcgcccgcccactggggtcggcgctgttcggtcactttggcgaccgtatcgggcgcaaatcgaccctggtggcctcgctgctgctgatgggcgtgtgcaccacgctgatcggtttgttgcccggttatgacagcatcggggcgtgggcgccgatcctgttgtgcgtactgcgtttcggccagggcctgggcctgggcggtgaatggggcggcgcagcgctgctggcgaccgagaacgcgcccaagggcaaacgcgcctggttcggcatgttcccgcagctcggcccttcgatcgggttcctggcagccaacggcttgttcctgatcctggccatgagcctcagcgatgagcaattccgcagctggggctggcgcattccgttcatcctcagcgcggcgctggtgatggtgggcctgtacgcacgattgaagctgcacgagacgccggtgttcgccaacgccgtcgccaagcaagcgccggtcaaagtgccgttggtggaactgttcagccagcattggctgccggtgttgctgggcgctgcgtcaatggtggtgtgctatgcgttgttttacatcactactgcgttttccctgagttatggcgtttcaaccctgggctacagccgcgaaaccttcctcggcctgctgtgctttgcggtgctgttcatggggctggcgacgccattggcagcgttggccagtgatcgttacggacgcaaaccggtgctgatcgtcggcgcgatcctggcgattctgtcgggctttaccatggagccattgctcacccacggttcgacctgggcggtggcgctgttcctggcgctggagctgttcctgatgggcgtaacgttcgccccgatgggcgcgctgttgccggaactgttcccgacacgcgtgcgttataccggcgcttcggcggcgtataacctggggggaattgtgggggcatccgccgcaccgttcttcgcgaccaaactggtggcgatgggtgggctgagttatgtcggtgggtatgtgtcggcggcggcgttgctcagcttgattgctgtgctgtgcctgaaagagacgcgggataatgatttgaatcgcgtgggctgatagaccgctatcgggggcaagccccctcccacatttgaatgtattcacaaatctaactctgtgaactggatcaagtgtgggaggggggcttgcccccgatgcttttagagctctaccaccacagcctgggaagcacgggtcgccttggcccgggccgcttcaatcgactcatcccgcgccaacgccacgcccatgcggcgctggccattcacctcgggcttgccgaacaggcgcagcgcagtatcaggttcgctcaacgcggcgcccaggttggcgaacgccgtctgggtcgactgcccttccaccaggatcaccgccgaggccgaagggccgaactgacggatcaacgggatcggcaggcccaggatcgcacgagcatgcagtgcgaactgcgacaggtcctgggaaatcagggtcaccaaaccggtgtcatgcgggcgtggcgacacttcgctgaaccacacctgatcacccttgatgaacaactccacgccaaacaggccgcggccacccagggcctcggtaaccgccttggcaacgcgctcggattcggccagggcaatcgggctcatggcctgtggctgccaggattcctggtagtcgcccttctcctgacggtggccgactggcgcgcagaaggtggtgccgccgatgtggcgcacggtcagcagggtgatttcgtagtcgaagtcgataaagccttcgatgatcacacggcctttacctgcacggccgccttcctgggcgtagtcccaggctttctgcacgtcatcgacgctgcgcagcaggctctggcccttgcccgacgaactcatcaccggcttgaccacgcacgggaagcccaggtcctgcacagccttgctgtagtcttcgaaggtatcggcgaagtggtacggcgaggtcggcaggtccagctcttcggcggccaggcggcggatgccttcgcggttcatggtcagcgaggtggcgcgcgcggtcgggattacggtgaagccttcggcttccaattccaccagggtggcggtggcgatggcttcgatttccggcacgataaagtgcggtttttccgcctcaatcaccgcacgcagcgcggcgccgtcgagcatgttgatcacgtggctacggtgcgcaacctgcatggccggcgcgttggcgtagcgatccacggcaatcacttcaacgcccaggcgctgcagttcgattaccacttccttgcccagctcaccgcagccacacagcaaaacgcgggtcgcggttggcgacaatggagttccgattcgggtcatctcaggtcctcaggggagcggatcattgggagaaaggccggcattttacatgaactgcaggaattggcctcagttggcgacggcccgcttgcggatacgccaggccatgatcagccacaccaccgtgaccccagcgaacttcgacaccagcgcagttcccgccaccgccggggtaagcgcgccgatcaggccgaagaagataaaggtgtcgaggggaatgctcagcgccgaactgatccacaggcggtcgtgcagcggacgcttggtgatgctgaacaccagccagtcgatacactcggacactgcgaaggccgtggcgctggcgagggcgatggccgggtcggacgtgacgtacgacagcaccagcgcggccagcatggcgatgattgcgccatggccgaagcgggtttgcaccatgtcgcgcaggataaagaccaggccaccccaggcggaccagatgacatccaggtgcggggcggtggagaaggcgaagttgatcagcacgacgctgctgatgtaggcgatcaggaagagcatgggagtggacctgtgaacaaggggcacagggtacttcacattttgaaatatgtcgtctgggtggaccctatcgggggcaagccccctcccacagttgaccgaggtgtcatggccggcgccgaacaatgtgggagggggcttgcccccgatagcggcggttcagacaccggatttgccaggcatcatccacaccaacccactcgccagcgcccgctcatgacataaccccagcaccacccggcgctcggcgttatccatgcggctccaacgcgtaatctcttccaccgtacgctggcagcccgtgcagatatcgtcatcgtccagcgcgcaaatactcacgcaaggcgacgcaacaggacgttcaatcgggttcattcttcctgctcgaccaggtcccgcgcataacgctgcgagttatgcacatagtgcgcggcgctggcttcgagcatgcgtttctgcgcgtcggtcagttcacgcaccaccttgcccggcgagcccattaccagcgaaccatcgggaatttccttgccttcaccgatcagcgaattggcgccgatgatgcagtgcttgccgatcttggcgccgttgaggatcaccgcattgatgccgatcaggctgtaatcgtccaccgtgcaaccgtgcaacatggcgttatggccgatggtcacgccggtgcccagcgtcagcgggtagcccatgtcggtgtgcatcacgctgccgtcctgcacgttactgttcttgccgatcaggatcagttcgttgtcgccacgcaacaccgcgttgaaccacacgttggcgccctcctccagcttgaccttgcccaccagggtggcattcggcgctacccagctgtgtggatgagtctcgacgcgggcgtcgcccaggcggtatttcatggtttttcctcacggcgttgccattcaaacgatggcttagatattgatgaaactcttgggcggttgatgcaggctgatcttggcgtcgtcatagagcagattgatcagctcgacgatcatgatcgccgtcagcccccagatcttgtattcgccaaaccgatagctgggcacgtaccaactgcggccctggtaatcgatccggtgggtatgttcgcgtgggtcctgtcggaagaagtccaagggcacgctgaaaaccgcggcaatctccgcatcgttggccaggtattcgacgtaatcagggatcacgccgacatacggcgtgacccgaatgccatgcagggagatcaaggggctcagcgggccgatgacttcgaccaggccgggtggcaggccgatctcttcttccgcttcacgtagcgcggtgaagatcaggtccgggtcttcggggtcgcggcgtccaccgggaaaggccacttcgccaccatgggtcgacaggccgctggcgcgcagggtcaggatcagctcaggttcgtcactgcgggtaatcggcaccagcaccgcggcctcggggaaacgcccgtcggcttcaagcaggtggggggtgtggttgcttacccgtcgaagtagctcgtccagcatgagtcatctcggtctgttggctaccttgcatcatgcaccaaagcgtacgggcgcccaaccccaaaacccgcccggtgtcgctaaacgacaacttgcagcgccctgcccgtcacgccaagatagacgcactttccaggaaccccagcatgaatttctgcagccagtgtggcaaaccggttacccaacgcatccccgaaggcgatggccgcctgcgctttgtgtgtgatcactgctcgaccatccactaccagaaccccaatatcgttgctggcacggtgccggtgtggggcgacaaagtgctgctgtgccgccgcgccatcgagccgcgcctgggttactggaccctgcccgccggtttcatggagaacggcgagacggtcgaacaggcagccgctcgcgaaaccctggaagaagcctgcgcccgcgtgcacaacctgagcatctacacgctgatcgacgtgccgcatatcaaccaggtgcatatcttctaccgtgccgacctggtggacctggactacgccgcaggccccgaaagccttgaagtgcagctattcgacgaagccgacatcccttggtccgagctggcgttccgcacggtcgggcgtaccctcgaatactatttcgctgaccgtcggcagcaggccttcccggtgcgcagcgaggccgtagagccgcgggtgttgcccgctccatgaccagggataccgttttaatgcgttggctgcttgcgcttatctgcctgtcgttcgcgaccctgtcatcagcctcgaccgtggaaaccctgggcggcaagaccgtcgaaaaggtcctggtgctcaagtccgcccatcagttgcagttgatcaacgacggcaagccgctcaagacctaccgcatttccctgggcaagaaccccaagggccacaagctgatcgagggtgaccgccgcacgccagaggggctctactggatcgactggcgcaagaccagcgaccgcttcaacctggccatgcacatctcctacccgaatatcagcgacgccgcccgcgcccgccgcgaaggcgtgaaacccggcagcatgatcatgatccacggcacccccgataccgaggaatacccggagcagtggttccacaccctggactggaccgacggctgcatcggcatgcgcaacgtggatatgcgtgaagtctggaacctggtcaaggacggcacactgatcgagattcgtccgtaatctcgtaccgttcgtaaaataattcaaaaaaaattcccatcccagcctgcgcccgccggtgaataccagttcatccccgcgggctgcgccgttctgcgcgcgataaagacctctctaataccacttgataccaggccccattgcagggcccttaaatcagtgaacgcactgttttcgctgcattgacatggtatttaagtggtattaatttccggccaataccgggcgacaacactccaataaccgcatcggaaacctgacagatgaatcccatcctggccctgcgccccgacgacaaacaatccacgccgctgtacctgcaattggcgcgcaaactggaagcagcgatccatgccggccagtggacgtccgaacaagccctgccatcggaacgcgtactcagcgagcaactgagcatttcgcgagtcaccgctcgcaaggcgctggaagtgttgtttgcccaagggctgatccgccgcaaccaaggctccggcacttacatttcgccacgcctggagcagccgctgtcgcgcctgtcggggttcagcgagatgctgcgactcaagggttttgtgcccagctcccaatggctggagcgtgaactgacccagccgacccacgaagagatgatccgcctgggcctgtcgcccgccgacaaagtggcacgcctcaagcgcttgcgtaaggcggacgacacggtgatggcgattgaaatgagcaccctgcccgccttggtgctgccgcagccccaagccatcggtcattcgctgtacgaatacctggaaggcatcggcaaaccggtggtgcgtgccctgcagcatatccaggcgatcaacgcctccgacgagttcgccaagctggtcggcatcgcccccggtaccgccatgctgctgatgacccgggtcggctacaccgccgacaacacgccgattgaaatcaccgacacctactgccgcaacgactactacgacttcgtcgcagagctgcgccgccatgactattccgctgaactgcgaatttagagaactgcccatgtccgaagacaacatcctcacgcccaacggctggattcgcggccgcctggtgcacgagcacggcaaggtggtcgccatcgaaggcgacccctgcgacccggctgacaacgaccggccctacctgctgccaggttttatcgacctgcacgtccacggcggcggtggcaaggacatcatggaaggcagcgatgccttcgagaccatcacccgcacccacgtgcgtttcggtacgacttctctgctggctacgaccatgactgcgccggtggatgaaatctcaagcgtactcggccagctcggcaccttctgcgaacggcgtccgacgggcagcgcccgcgtactgggtgtgcacctggaagggccttacatcaatccgggaaaactcggcgcccaacccaactttgcccacaccgcattgatggccgaagtggaagcctacctgcgcctggcgccgatccgtgtaatcaccatcgccccggaaatcgccggccacgatgccctgatccgcgccctcagtgaacgcggcgtgcgcatgcagatcggccataccctgggcagctatgaagaaggcgtcgccgccctcgctgccggcgccaccagcttcacccatttgtacaacgccatgagcccgctgcatcaccgcgagcccggcatcgtcggcgccgcactggcccacgccaagtacgccgaattgatcccggatttgctgcatgtgcaccccggcgccatgcgcgtggctttgcgctcgatcccgtgcctgtactgcgtcaccgactccaccgccgccgccggcatgcccgatggtgaatacaagctgggcagccacaccgtgaccaaatgcctgggcggcgtacgcctggccgacggcaccctggccggcagcacgctgaccatggaccaggcgctgcgcaacctggtgaagatcggcctgcccatcagcgaagcctcacaacgcctgtcgcaatttcctgcggactacctgggcctggaagaacgcggtcgcctgcaacccggcagtttcgccgactgcgtgcgcctggaccgcaccctgacactcaccgacgtaatggtcgaaggagaaaccattgacttcaaaaatgcttgaagaggccctggcctcctgcgacgccgtgtcggcgcaattgcaacgcctggacccactgctggaagaagtcgccggccgcctgcgccgccagccgccgcaagtggcgatgaccatcgcccgcggcagctcggatcacgccgccagctacttcgcctacctggccatgcagcacgtgggcatcccggtggcgtcgttgccaatgtcggtggtgaccctgctgcaagccccgttgaaagtcagcggccaagtggcgttcggtttctcgcagtcggggcaaagcccggacctggtcaacagcttgcgcctgctgcgcaaacgcggcgccctgagcatttcgctggtcaacgctgaagactcaccgctggaagccgcctgcgaattccacgtgccgctctgcgccgggccggagcaaagcgtcgccgccaccaaaagttttatcgccacactgagtgccagcgcgctgctgattggccactggaaccaggaagccgacttgctgcaagcctgccgcgccttgccggacgaactgcgtgccgccgccaggcaggactggacggtcgccatcgacgccctgcgcgactgccagcaactgatggtgatcggtcgaggcgccggttttgccatcgctcaggaagcggcgctcaagctcaaggaaacctcggcgatccaggccgaagccttcagcagcgccgaggtacgtcacgggccgatggcactgattggcgacaactaccccctgctggtgttcgccccgcgcggcgccgagcaagccggcctgttgagcctggccgccgacatgcgtcaacgcggtgcccgcgtgttgctggctgcgccggacgatatcgccgagcgtgacctgaccctgagccgcgccgaacatccgaccctggacccgatcctggcgatccagagtttctacgtgatggcggcaggtttggccgaagcccggggcatggacccggaccagccgcgtcacctgagcaaagttacccgcactcactgagtggcgttttcctgatgagtaccgtgcccatgtccaacaacaataatgacctgaccctcagcgcccccctcagcggaccggtgctggccctgggcaacgttcccgacgaagtgttcgccagcggcgccatgggcgagggcattgccatcgacccgttgaatgactgcctgcatgcaccctgtgacggcgtgatcatccacgtcgcccgcaccgggcatgcgctgacgatccgcgctgacaacggtgccgaaattttgatgcatgtgggcatcgatacggtggaactgaacggcgaaggcttcgccttgctggtgaaggatggcgcgcgggtaagcaagggccaggcgctggtgcagtttgatctggaccgcattgcacgccagtgcaagagcctggtcagcctgatcatcctgaccaatggcgagcgcttcgagttgcgctcggtggcggctagaacggtcaaggtcggcgagccgttgttgcagatcgtggcgcgttcggcgacgtcggtatcgacgcctgtggataactcggcgggtgaagccagcgcccgcgtacgcatcacccatcgcggtggtttacatgcccgcccggcggcgttggtgcgcaaggctgcgcagggtttcagcagccaggcctcgctgcactttggcaataaaaccgcctcgtgtgacagcctgatcggtttgctgggcctgggtatcggtgaaggggatgaggtgcgtgtgagctgtcgcggcaaggatgccgaagcggcggtgcaggcagtgatcgcggccttgtcagccgtcgtcaaggaagaacaccacaccccggtggccgccgcgccccgtcgggtcaataccgaagtgggtgtgttgcaaggcgtgtgtgccgcgccgggcctggtctgcgggccattgttccgcctgaccggtatcgaactgccggcagacaccggcaagcatgctgccgacgagcaactgcaacgcctggacgccgccctggagcaggtgcgcagcgaaatccgcagcaccctggatcatgcgcgccagcgcaggaacgttgaagaagaagacatcttcgccgcccacctcgccctgctggaagacccgaccctgctggacgccgccaccggcgccatcgagcagggcagcgccgccactcatgcctggcgcgacgcgatccaggcgcaatgcgccgtgttactggccctgggcaaaccgctgtttgccgaacgcgccaatgatctacgggatttgcagcaacgggtactgcgcgcattgctgggtgaagcctggcacttcgaattgcccgcaggggcgattgtcagcgcccacgaactgaccccatccgacctgctgcaactgagcgcgcaaaatgccgcaggcatctgcatggccgaaggcggtgccacctcccatgtggctattttggcccgtggtaaaggcctgccctgtgtggtcgcgctgggcgccgaagtcctcgatgtgccccagggccaacgcgtggtcctcgacgccgccaacggcaggctggaactggcgcccagcgatgcgcgccacgccgaagtacaccagattcgcgatgcgcagaaactgcggcgccagcaacaacaggcccaggcccgacagccggcacgcaccgccgatggcgtgagcatcgaagttgccgcgaatgttgcctccagcgccgaagccttggtggcgtttgaaaatggcgccgatggcgtcggcctgctgcgtaccgagtttctcttcgtcgaccgccgcaccgcgccggacgaacaggaacaacgccaggcctaccaggccgtgctggatgccatgggcgacaagtcggtgatcatccgcaccatcgacgtgggcggcgacaagcaactcgactacctgccgctgccggtcgaggccaacccggtgctgggcctgcgcggtatccgcatggcccaggtacgcccggaactgctcgaccagcaactgcgggcgctgctgcaagtcagcccgctggaacgctgccgcatcctgctgccgatggtcagcgaggtggatgagttgttgcagattcgccagcgcctggacgagttgtgcgccgagttggaactgacccagcgccccgaactgggcgtgatgatcgaagtgcccgccgccgcgctgatggccgagcatttggccaaacatgccgacttcctgtccatcggcaccaatgacctgtcccagtacaccctggccatggaccgcgaccacgccggcctcgccgcgcgcgtcgatgcgctgcacccagcgctgctgcggctgatcgcccagacctgcgcaggcgcggcgaaacacgggcgctgggttggggtctgcggcgccctcgcctccgacccgctggccacgccggtactggtcggcctgggggtcagcgagctgtcggtgagcccgccgcagatcggagaaatcaaggatcgcgtccgccacctggacgcggcgcaatgccggcaactgagccagggcctgctcgacctgagcagcgcccaggccgttcgccaagcctgtcaacaccactggccgctgagctgacaacaacaagaaaaaaggagactcgccatgtaccaacatttcatcgaaggcctgcaacgcctgggtcgtgcactgatgctaccgatcgcgatcttgccgatcgccggcctgttgctgcgcctgggcgacaccgatcttttgaacatcgcggtgatgcacgacgccgggcaggcgatcttcgccaacctggcgctgatctttgccatcggcatcgccgtgggttttgcccgcgacaacaacggcacggccggtttggcgggtgcgattggctacttggtgatggtttccacgctcaaggtgatggacacgtccatcaacatgggcatgctcgccggtatcgccagtggtttgatggcaggcgggctgtataaccgcttcaaggacatcaagctgccggagtacctggcgttctttggtgggcgacggtttgtgccgattgtcaccgggttttcggcggttgcgctgggtgtgatctttggcctgatctggccgccgatccagcacggcatcaacagcttcggcgtgttgctgatggagagcggcagcctcggcgccttcgtgtttggcgtgttcaaccgcctgctgatcgtcactggcctgcaccatatcctcaacaacatggcgtggttcgtgtttggcaccttcaccgacccggtgaccggtgccgtggtgaccggtgacctgacccgttactttgctggtgaccccaaaggtggccagttcatgaccggcatgttcccggtgatgctgttcgggctgccagcagcgtgtctggcgatgtaccgcaatgcgttgccggaacggcgcaaagtgatgggcgggattttcctgtcgatggcgctgacgtcgtttctgaccggggtgaccgagccgattgaattcgccttcatgttcctcgcgccgtttttgtacctgatccatgcggtgctgaccggcctgtcgatggcggtcaccaatatgctgaatatccacctgggctttaccttctccggtgggtttatcgacatggtgctgggctggggcaagtccaccaatggctggctggtgttcccggtaggcctggcgtatgcgctgatctactacagcgtgttcaactactgcattcgcaagttcaacctgaagacgccggggcgggaagatatccaggtggtgcaggctgaggtgatgacggataaccagcgcgccagtgcctatattcgtgcgctcgggggtgcggcgaacctgctgagcgtgggtgcgtgcactacccgtctgcgcctggacatggttgatcgcaaccaagcggtggatgcggagctgaaagcactgggcgccatggccgtggttcggccgggtaacggcgggagtttgcaggtggtggttgggccgatggcggatagcattgctgatgaaatccggctggccatgccttcgtttgttgccagcgcgccggtgaaggtttcccctgtggataagccggtggcggtgaatgtgcaggaggccgagaagtggctgagtgcgttgggtggccaagcgaatgtgcggcagttggaagcggtggcgatgacccgcttgcgcgtggagttgggagatgattcggggctgtctgaagctcagctcactgcgctcggttgccaaggtatgagtcagcttgagagcggtgtttggcacctgttgattggtgacaaggcttccgggttgggtgaggcgttggagcggttggtcagtggtcgagaggtcggcgccagggtttagagatgcagtggctgttctcgcctcatcgggggcaagccccctcccacagttgaccgcattgccaaggtgggagggggcttgcccccgatgaggccctgacagacaacaaaaaacccgctgaccaaactggcccagcgggtttcttgtttttgcagcatgcgaatcaaaagtccgccaactgccacacctcataggccggtgtctcatacgggtggctgagtttcaaagcagccacaacagccacaatcaactcatccgccaccaccaactccaccttccactcttcaaccccttcaacctggcccacctgtccgatgaacggctggctgccgtccaacgcgcggaattggccctggcccagcacttgccaggcgcagctgtcgtagttgccgatgcgcccgccgccggcggcaaagacggcgatcttcaccgtctccacatggctgtcgggcacaaagaaggcgagcttgtacaccgtcttagttcacccacacgcgggcgttacggaacatgcgcatccaggcgccgtcttcgttccactcttccgggcgccacgagttttgcacggcgcggaatacacgctccgggtgcggcatcatgatggtcacgcgaccgtcgcggctggtgaggccggtgatcccgcgcggcgagccgttcgggttggccgggtaggtctcggtgaccttgccatggttgtcgacgaaacgcatggccacgcaaccggacaggtcggcttccaataaagcttcttcgctggaaaactcagcgtgaccttcaccgtgggcgatggcgattggcatgcgcgaaccggccatgccttgcaggaagatcgagttggactcctgcacctgcaccatggcgacacgggcttcgaactgctcggaacggttgcgcacgaagtgcggccagaactcgctgcccgggatcagctcgctgaggttggacatcatctggcaaccgttgcacacacccagggtgaagctgtcgttgcgctcgaagaaaccctggaacgcatcacgcgcacggctgttgaacagggccgatttggcccagccttcaccggcacccagcacgtcgccgtaggagaaaccgccgcaggccaccaggcctttgaactcgttgaggtcaacgcgaccggcgaggatgtcgctcatgtgcacgtcgatcgcattgaagccggcacggtcgaacgcggccgccatttccacctggccgttgacgccctgctcacgcagtacggcaacctgtgggcgaatgcctttcttgatgtaaggcgcggcgatgtcctggttgacgtcgaagctgagcttggtgctcaggcccgggttgtcttcttccaggatcacgtcgaattcctgctcggcgcaatcggcgttgtcacgcaggcgttggatctggtagctggtctcggcccactggcgttgcagcaagcggcgctgaccggcaaaaacagtatcgccgttgaaggagatgttgatctcgccgttgttgatcggctggccgatcaccgccacgcagtcgtccaggccggcggcgctgaactgtgcaagtacgtccggggtagcgtcctggcgcacctggatcaccgcgcccaactcttcgttgaacaggatgccgttgatctcggccgcatcctcggcaacgctgtcgagcacgatgttcaggccgcaatgaccggcgaaggccatttcgacgacgctggtcagcagaccaccatcggaacggtcgtggtaagccagcaggtggccgtcggcattgaggccctggatcacggcgaagaacgccttgaggtcttcggcgtcatcgacgtccggtgcctgtttgccgagcttgccatgggtctgcgccaggatcgaagcgcccatgcggttctggccacggcccaggtcgatcaggatcaggtcggtggtgcccttgtccatgcgcagttgcggggtcagggtctggcggatgtcggtgaccggtgcaaaaccggtgacgatcagcgacagcggcgaggtgactgtcttgtcgacgccgtcttcgttccaacgggtggccatggacatggagtccttgcccaccggaatggtgatacccagctcagggcacagctccatgccgaccgccttgacggtgtcgtacaggcgcgcatcttcacccgggtggccggctgcggacatccagttggccgacaacttgatgtcggacagcttaccgatgcgcgatgcggcgatgttggtgagggtttcaccaatggccatgcggcccgacgccggagcgtcgagcagggccagcggggtacgctcgcccatggccatggcttcaccggtgtagacgtcgaagctggtagcggtgacggcaacgtcggccaccggaacctgccacgggccgaccatttggtcacgggccaccaggccggtgatggtacggtcgccgatggtgatcaggaagctcttgctcgccacggccgggtggtgcagcacgcgttcgatgctgtcggccagttccagcgtgcttgggtcgaaatcatcgcccagctcggcttcacgcacagcggaacggtgcatgcgcggggctttgcccagcagcacttcgagcggcatgtccaccgggctgttgccgaagtggctgtcggtgaccgtcagttgcggctcggcagtggcttcgccgaccacggcgaacgggcagcgctcacgctcgcagatggcttggaagcgcgcgaagtcttctgcgccaaccgccagcacgtagcgttcctgggattcgttgctccagatttcgtgcggggccatgcccggctcgtcgtttggaatattgcgcaattcgaagcggccaccgcggtcgccatcgttgaccagttccgggaaggcgttggacaaaccgcccgcgccgacgtcatggatgaagctgatcgggttcttgtcacccaactgccagcaacggtcgatgacttcctggcagcgacgctccatttctgggttttcgcgctgtaccgaagcgaagtccaggtctgccgagctggtgccggtggccatggaggaagcggcgccgccgccgaggccgatcagcattgccgggccgccgagcacgatcagcttggagccgaccaggatctcgcctttcttgacgtgttcttcacggatgttgcccatgccgccggccaacatgatcggcttgtggtaaccgcgcacttcatcgccacgcggggtggtgatggactgctcgaacgtacggaagtaaccggtcagggccggacgcccgaattcgttgttgaacgcagcgccgcccagtgggccttcgatcatgatgtcgagcgcggtgacgatgcgctcaggcttgccgtacggcacttcccacggctgttcgaagcccgggatctgcaggttggagacggtgaaaccggtcaggcccgccttgggcttggcgccacggccggtggcgccttcgtcgcggatttcgccgccggaaccggtggctgcgcccgggaacggggcaatcgcagtcgggtggttgtgggtctcgaccttcatcaggatgtgcaccggctcctgcaccgcgccgtactggcgggtctcagggtccgggaagaaacggccggcgacggagccgacgatcaccgaggcgttgtccttataagcagaaagaacaccttcgctgtgcatcacgtaggtgttcttgatcatgccgaacaggcttttttcctggctttcgccgtcgatgtcccaactggcgttgaagatcttgtgacggcagtgctcggagttggcctgggcaaacatcatcagttcgatgtcgtgcgggttgcgcttcaagccgttgaaggcattgaccaggtagtcgatctcgtcttcggccagggccaggcccagttcggtgttggccttctcgagggcggcacggccaccaccgatcacgtcaatcgcggtcagcggcttgggctcggcgtggctgaacaggccggcagcctgttccagctggctgacgatgatctgggtcatgcggtcatgcaggctgctggcgatcagctcggcctcggcatcgctgaactggccggcgacatagaaagcgataccacgctccaggcgctggattttctccaggccgcagttgcgggcgatatcgctggccttgctcgaccaaggcgagatggtgccgaaccgtggcagaaccaggaacaagcggccagtcggctcttgaacgggaacgcttgggccgtacttcagaaggcgtgcgagcacttgctgttcgtcggcggtcaatacgccggtaacgtcggcgaagtgagcaaattcagcgtacaggcctgtaacagctggaaccttctggctcagttgctcaaggagtttgctgtggcgaaaggcagaaagggcaggagcgccgcgcaggatcaacatcttcgggacagcctcgggaagggggtgtgctttgaggccgtgcattctagcgtaaaccgccgccaacggcacccgaaacgctaccggtggctgccgccgaacgtcagttggccggattacacccctttcgcggggtcatagggggcattcggcgcagttattttaaccgtcacaatccctcgccaagccgcgtttctgcgggttgcagcacagttttgccagcgctagcagacaacgcccatgctgtcgagatatggcgccgtgggccgtttgcgtatactgcgcagatgttctccccaacggctttgcgaccgcgatgcgccaaatggctcatcgccaccggactcttcctgatgctcagcgcctgtgttgataaacccagcacgctcgagcgaatcaaggaggatggcgtattgcgggtgatcacccggaacagcccggcgacttatttccaggaccgcaacggcgaaaccggtttcgagtacgaactggtcaagcgcttcgccgacgacctgggcgtgaagctggagatcgagaccgccgacaacctcgacgacctgttcggccagttgggcaaacccaacggcccggtcctcgccgccgccggcctggtcagcagcgaacagcgcaaggcgcaggtgcgtttctcccacccttacctggaagtcaccccgcagatcatctaccgcaacggccagtcccgcccgacgaacgcggcagacctggtgggcaagaagatcatggtgctcaagggcagcacccacgccgaacaattggcggcgcttaaaaagcagaatcctgcgattgaatacgaagaatccgacgccgttgaggtggtcgacctgctgcgcatggtggacgaggggcaaatcgacctgaccctggtggactccaacgaagtggcgatgaaccaggtgtacttccccaacgtgcgcgtggcgttcgacctcggcgatgccagcaaccagagctgggccgtggcgccgggtgaagacaacagcctgctcaacgagatcaacagctacctggataaagtcgaaaagaacggcacgttgcagcgcctgaaagaccgctactacgggcacgttgatgtgctcggttatgtgggtgcctacaccttcgcccagcatctgcagcagcgtttgcccaagtacgagaaacacttccgcgcctatgccaaggaagaaaaggtcgattggcgcctgttggccgccatcggctatcaggaatcgctgtggcagccggccgtcacctccaagaccggcgtgcgcggcctgatgatgctgacccagaacaccgcccaggccatgggcgtgtccaaccgcctggatcccaagcaaagcatcatgggcggcgccaagtacctggccaagatcaaggatgaactggacgacagcatcgccgagccggatcgcacctggttcgccctcgccgcctacaacgtcggcaccggtcacctggaggatgcgcgcacgctggccaagcgcgagggcctgaacccgaacaagtggctggatgtgaaaaagatgctgccgcgcctgtcgcagaagcagtggtacagcaagacccgctacgggtatgcgcgaggcggtgagccggtgcactttgtggcgaacatccggcgttactacgacatcctcacctgggtgacccagccgcagctggagggcaaccaggtggtcgaaggcaacttgcatgtgccgggtatcgacaagaccaagccgccggaagataaccctcaattgtaagaacaccacaaaacccggtgggagggggcttgcccccgatagcggtgtgtcagttactactaagctggcagatacattgcaatcgggggcaagccccctcccacattgggatctctaccgggcttagaggccggtaagcaggtggaccactccgcctgcgagcatcatcactgccggtactcccgccgccttcaacgccacctcatccaaccgccccacatcctgcaactgcaccctcacccgcgtcaacgccacacgctgctgcgacttgaggttgtccgcgccgcccagcgcgctgattacttcggccggcaatagactctgcgtcggtgttgctacggtctcggcaatcaaatccggcgtcagggccttccagaacgcccgctgcaatttctcgaacatgctcaaagctccatgacaggtgaggtttcaacggtagctgcgtgatattggcgcagggcctcacgcacttgggcggcttcttccaggcccaacacttggcgggcgatgatctggcagtcggccaggtccagttcgcgcacggtggccttgatggtggggatcaacggcacgctgactgacaactcgtccacgcccagcccgatcagcaccggcgcggccagcgcttcggaggccagcgcaccgcacacccctacccacttgccatgggcatgggcggccttgacggtggtggcgatcaggcgcagcaccgccgggtggaagctgtcggcctggctggccaggcgcgggtggtcgcggtccatggccagggtgtattgggtcaggtcgttggtgccgatggagaagaaatccacgtggggcgcgaacacatccgccatcagcgcggcggacggtacttcaatcatgatgcccagcttcggcagctcggtaagccccagcgccagcgcttcctcttccagaatcttgcgcgccaggtgcagctccgacagcaggctgaccatcggcaacatgatgtgcaggcgcgcaaaaccggcgctggcaaggatcgcgcggaactgttcgcgcagcagctcaggacgttccaggcacaggcggatgccgcgcaggccgaggaacgggttggtttcggcatccatcggcacataggccaacggcttgtcaccacccacgtccagggtgcgcaccaccaggttgcgctcggtgcccagggcacgggcgatggcggtgtaggtggctgcttgttcatcggggcctggcgcacggttgcggtccaggtagagaaattctgaacgcagcaggccgacgccttcaccgccgagggtcagggattgctcaacttcctgcaaggaggccacgttggcggtgacttcaacgtgatggccgtcgcgggtggtggcgggcaacgacgcctgcgccacatcgcgctgatggcgcagcacctgttgcttgcgggcagtttccaactgctcgatttcggccaggttcggctccaggtgcagctcacctttgtcggcgtcgagcagcacctgtttgccattggccagccccagaacctcggctgaaacaccgcaaatggccggcaggccaagggcacgggccaggatcgcgacgtggctggtcgcgccaccgccgacagtgacgaaccccagcactttgcgggtatccaggctcgccgtctgcgaaggggtcaattgctcggcgatcaggatcgcgcgctccggcaagtcccaggcgctgtcctggatgcccaggatcagtttcagtacgcgctggccgacgtccgccaggtctgccgcgcgctcggcgatcagcgcattgcccaggccctggaacagcttgacggtcgcgagcgtggcactgttccaggcaaacgcggcgctcttgccctccgccaacaaactgtgggcgtgttccagcaaggtcgggtcttcgagcaattcctggtgagcgcgaaaaatctcggcctgggcactgccagcagccttgtcccgcagcgcctgcaatgcctcagtggcagccagcaggccacgcttcaaagcagcacgctcagtggcttcacccgtgccatgttcagtgatggtcaactcaggttcagtcacttgaaccacctggccaaacgccgaccccggcgatgcacacacgccacctagcacggtcgccgacgactgcgttgccaacggctcggcaacgctcgccactacctcgccacaaccttcagccaacaaggccaccagcgccttgatcgccacttcggcatcctcacccgcagcgctcacctgcaaggtatcgccgtgcacggtttgcagcgccatgatcgctaccagtgatttggcgttggcgctctgggtttgcttgtgcaggtagatgctcgccttgaagcccttcgcggcctgggcgaacaccgccgccgggcgggcgtgcaaaccgttggcattgggcaaagtcagcggtttggagaacagtgcgtcgccctcctcttcgtccactgtgtcaacggcttcacctggggataactgcaacagcggctggccgacctctacacaatcagtggccaacacgctgaacggctcgccgctgaccaccagcatcaaggtcagcagactgcgcgcatggagcgccacatagtcggcatcgaattcgatcagcgcctgcccggcctccacccgctggccttcctgcaccaaccgggtgaagcccttgcccgccaggttcacggtgtccaggccgatgtgcatgagcacctggacgccgttgtcgtcggtaatgctgacggcatgaccactgtcctggatattgctgatcgtcccggccaatggcgcgcagagggtctgcgacgtggggtcgatgcacaggccatcgccgatcaggcggctggagaagaccgggtcgggcaccttgtccagcgccagcagcacacccgacaagggcgccagcaattccaggggttgcgttgtggtcatgacttcacctgctgttttgttctgtagatatattgagcggaggaaggatcacttccaccagtactcaacctgcacaccaacgttcgacccatgccgcgccgtgccatacgagccggtatcggacaacgccgaccccgccgccaattcattcgccgcacgcttggccgcttcgttccaggtggcataggtgtagtacaagcgcacctccggccgcgcccagaaatccgggcctttgggcgaccaggtcggggcgaaggtgaatttgctcagcttgcgcgtcccgcccgtagcctcgacctgatcatgcccaagctccgtgaccagtttgaactgctcgctgatggcgtacgccgggcgcacaccgagggacatccaggtctggtcctggctgcccggacgaatatccttctggtacaccgcttcgatctgcccaccgaaacgcggggtcacctgccagtcgaaaaactccacggcgcggtaacttttgctgctgttgtccaggaaggtattgccggtgtaacccaggccggtgccggggccttcgccgtactgcaaggcgaacttgttcttgccgcccaggaaaggtttttgcacgtgctgcgcggtgatcgcccagccgctgttggtgtcacgcccgccggctttttcgatgtagctaaggcccagctccagctccccgccggggttggtcttgaagcctgcaacgttgaagtcatgacgggtcgcgtattccttctggtacaggttgtccttacgagaaatggcgtagctgtacttgaggtcgccgatcagcacgtcctcgataccaccgcccgtggcgctctggttccagtagtagaagtcggagatatggatgtcattacgtttgtagtaacgccggccggcccacagtgaaccgccattgaggctgggcaggttggaccactgcgcatacatctgcggcatgcgcgcggtgccgttgtcttcgccctggaacttcagcgcgcggtcgtacttgttgtagagcgatgccatggcatcgacgctgagcaccgagccgtcgtcgagggtgagcaggtcctggcgcagctccagctcggcgtattgctcgcattcgttacccaggcggtacttggattgcgcccccggcagttggaagcactgctgcgggccgctgcccgtggaagtgcccgcgccgctgcgcaggtaaccggcaaattccagggcttgagcgccgaacggcaagcccaggcaagacgcaacgaggcccagctttattgttgttttcatgaagcactccgatatttttattatgttttttgaagcgccccgtgctcccacacggggttacaacaggtctcagtccttgaggtgcagcacgaacgattcgtaaggacgcaatgcaaccgtgcccgttcgcaccgggcagtcggggtagttgctgatcagcaggcgttgctcggtcgcctggttgatcacgttgtccggcagttggatttcgcagggcgtgccgtagaagttgttcagcaccagcagacgctcgccctggccttcgcgcaggtacgcccagacttgcgagtggccttgcagcagctcgcgataaactccttcttggatcagcggttcatgacggcgcaacgcaatcaatgcgcggtagtgatgcagcacggactcggggtcatccagctggctttcgacgttgatgatggaggcgttggccggaatgccaatccagggttcaccggtactgaaaccggcgttctccccggcatgccactgcatcggcgtacggccgttgtcgcgggacttctgcatgatcgccgccatgctcgacgccgcggactcccccgcatcgcgcttgagacggaagatgttcagggtctccacatcgcggtactgctcgatccggtcaaagcccggattggtcatgcccagttcttcgccctggtacacatacggcgtgccctggagaaagtgcagcgcggtggcgagcatcttggccgagaccacgcgatgctcgccgtcgttgccaaagcgcgagaccacccgcggctgatcgtggttacaccagaacagcgcgttccagccaccaccggcctgcatgcccagttgccagtcagagaagatctgcttgagttgcaggaagtcgaagtcggccttcacccacttctgcaggttcgggtaatcgactttcaggtgatgaaagttgaaggtcatcgacagttctttcgacgcaggattcgagtagcgaatgcaatgctcgaggctggtggaggacatctcgccgacgttgatcaggtcatgcccttcgaagacttcgcggtgcatttcctgcaggtattcgtgcacgttcgggccgtcggtgtagaagcgccggccatccgtgctgtcctcggggaaatcggcgggcttggagatcaggttgatcacgtccaggcggaagccgcccacgcccttgtcgcgccagaagcgcatcagcttgaacacttcggcacgcaccttggggttgtcccaattcaggtctgcctgggtgtggtcgaacaggtgcaggaaatactggccggtttgcgcctcgtattcccaggccgagccgccgaacttggattcccagttgttcggctggtcgcgccagatgtagaagtcacggtacgggttgtcgaggctgctgcgcgcctgctggaaccattcgtgttcgatggaggtgtggttgaccacgatgtcgagcatcagcttgatgccgcgcttggccgcttcgctgatcagcaggtcgcagtcggccatggtcccgtagctggggtcgatggcgtagtagtcgctgatgtcgtagccgttgtcgcgttgcggcgagcgcaggaacggggtgatccacaggcagtcgacgcccagccatttgaggtagtcgagtttgtccacgatgcccagcaggtcaccggtggcgttacccgcgtggctgtggaagcttttggggtagatctggtagatcaccgagtgttgccagtcttgcatggtgggttccttcagttgattgttgtgcaggcctttcgggcctcatcgggggcaagtcgagtcgtcgcaccgcccctcccacatttgaaatgcgttccaatgtgggagcgggcttgcccccgattgcgccggttcaggcgacgcgatacccaggccgaacaatcttcatgctcaacgcacaggtcaaaacgaacggcacgacaatcgcgatcaccatcccgatcacaaaactggggatgtactgcggcatgatcgaaatgaatccaggcaagccaccgacgccgatcgccgacgcctgcaccttgttcagcgacaggaaaatactgcccagcgccgagccgagcagcgcggcatagaacgggaacttgaagcgcaggttcacgccgaacattgccggttcggtgatgccgaaatacgcagaaatcgccgaggtcgaggccatgcttttgtcccgcgcattgcgggtcatgtagaacacaccgagcgcggcgctgccctgggccaggttggacatcacgatcatcggccagataaaggtgccgccctgggtggagatcagttgcaggtccacggcgaggaacatgtggtgcatgccggtgatcaccagcggcgcatacagaaggccgaaaatcgccccgccgaccatcggcgccaggtcaaacagggtgaccacgccttcggtgatcaggatgccgaggtgacgggtcaccgggccgatgatcgccagggcgagcacgccggtaacgacgatggtggtgatgggcacgacgagcagctgaatcgcattggggacgcgtgcgcgcaaccatttctcgatgacgctcatcacatacgccgccatcaggatcggcaggatctgcccctggtagccgactttttcgatcttgaaccaaccgaagatatcgaagtacggcaggctctggccgtcgagaccagcgaccgccttgccgtagttccaggcgttgagcaggtccgggtgtaccagcatcaggccgagcacgatcccaaggatttcactgccgccaaaccgcttcgccgccgaccagcccaccagggccggcaggaacacgaacgaggtgttggccatcaggttgatcaggctccacaggccatccagattcggataggcctccagcagcgtcttgccctcgatgaacatgcccttggcacccatcaggttgttcacgcccatcaacaggccggcgatgatcaacgcgggcaggatcggcatgaacacatcggagaacacgcgcaccaggcgctgcatggcgttggtcttgtcggcgcccttcttcttcacgtcagcgatagtcgcggcggcgaggccggtctgttcacgcagggcggcgtagaccttctccacttcgccggggccgatcaccacctggaacaatccaccggtgaagaacgagcccttgaccagatcgacctggttcagcgcgcggctgttgaccaggctcgggtccttgagcgccaggcgcaggcgggtcacacagtgggcagcttgctcaaggttgtcgctacccccgaggttctcgagaatctcgcgggcgatagtcgaatagtcgtggctcatgcttggtttccactttggtttttttttattgggggcagtcattggcagcacgccgagggcaaaagtactcgtctgtacgagttaaagcaacaactcgtctgtacgagttacatattgtttattttttgtaggacgccgcaccgctgcgcgccgcataaatccaagggtccaatggacaaaccccagccgggccactaaggttcctgccttgaccgcaaccccggcaaagagccatccccatgagcaaatacaaccagatctatacggatctgcttgccagcatcacgactgaacgcctgcaacgtggcacgcgccttccctccgaaaccgaattgatgaacagctaccaggccagccgaggtaccgtgcgtcgcgccatcgagcagttgcaggagcgcgggtttgcgcaaaagatccacggcaagggcaccttcgtgttgtcgcccaacccgatcgagttccaactcggcggcatcgtcagcttccacgaaacccacgccgacctgggcgacgacgtacgcactgaagtagtcgagttcacccaattcccgctggaaggctcactgctgcaacacatcgaagccgaacccggcaccctgatcacccgcatcaaacgggtacggcgcatcggcggcaaacgggtgatcctcgacatcaaccacttcgtggccgacgtgatccccggcctggaccgctcgattgccgagcagtcgatctacgcgtttatcgaacagactttgcaactgcaaatcgcctacgcccaacgcaccatcgaagccctgccgcgcagcaaggatgaccagacacacctcgacctcgacggtcagagccatgtgatcgtggtgagcaaccagacgtttttgcaggacgggcggcagttcgagtacaccgagtcgcggcatacgttggataagttttacttttcggatattgcgcggcggtaggcacaagtcggggaggtcattgcaccgcgatactcttggccagtcctgccgtccacgcagcagtcatcttctcccctaccagcaccttgggttgaacacccgacacccccgagtaggtggcgtagattttcagaaggtcgtcaaacaggtctttggccccgtcatagaccaacagctcggagagcttgacctcaggcggtgactcaccatccgcgtcatgggcaacgctgatacgccccaactgatgcgggcctacaatgctcaacaacgcgaagtcgtcaaagccgcgcaccgacttgctgaagcgtcgcacaagttcgtccttgagatgtccctcggggatatgcatctcgaacagaggatggactccatactcccagttgtagctttccaggcgcaccggcatggtcagggagacggcattctcttcgctgacggtgtcgttatatgagaaaaccgtatcgcggcagctctcctctccctgcccgagcgttcccgcaggcacgccgccttcgccgatatagagccgctcacgtcgactggtcatggatattctccgatttcagctcatcaagggtcttgcgccgacgtttggggatggccgtcaactcatatcccaagccctcaagaatggctgcgaccttgcgaatccccacttccgggatggtattgttctcaatccccgagtacaaacctgcggccggagctgccttgattcagcctggaactaggccgctaatgccgacgactccattgccaatgacgcgttataaaacatgatgagtagatactttccctgtcgtcgggcattggccggcttatacaaagtctgggtggtgatgctcagcgctcttctcatcgcctgccaatcaccgcgcgaggctctgcaacaactggctgaggagcaccatcgacaatgggaggtcctgccgggagagcactttcctctcttcatacttgcgccgcacactgcagaaaagatcactcgcctgcgtgtgtacctggaaggcgatggtcattcctgggccacggccactcaacccagcctggatccgagcccgcacaatctgttggtaccacggctggcgatcaatgatccgacaccgaatgcgtacctggcacgcccctgccagttcgtcatggtcgcagcctgcgaatcagcgctctggacccaccgacgattttctcaggaagtggtcacccgcctcagccaggcgctggatcaattaaaacagcgctacggcaacagtgagttcgaactggtcgggtactccggtggtgccgcgctcgcattattgttagcggcacagcgcaatgatgttacccaggtgcaaaccctcgctggcaatctcagtccacgcctgtgggcgacgatgaaaggcctgtcgccactcgacggttcactggatccgctggactatcgtagtcaactcgccttgttgccccagcgtcatctcatcggcgaagcagacctgatcgttccaagtcgtttggcggacaggtatcaacaggcgcttgactcgcccctctccgaattcgttcatgtaccgggagcaagtcatgacagggggtgggaagcgacgtggagccgatgggataaaacaccattgatgcatgagaatcctgaaatcaagggaaaataggtccgcttaaaaacatctgaataccattcccctagcgcgaccataaccaccacctaaaagtttcatttgttgctcaattaccccgtaataccgcgaaaaataacggtaacgtcgcatttattagatttttttcgtcacttatcctttttatgatgaattgtcctacaggcatcgtgtagattcccacgcgcttgaatcagcaattcactgacaagctggcagggatgcctaaaacagacgctgacgcgtgggttgttccctgtcagtttctgccctgtaaggatactgccttgaatatttcccacctgcgccgctctttgttggcgctgtccgtcgcgactgctactgcgacagcatatgccgtacccgcccccgacttgaaccacgacctgagcacaggggcatacagcagctccggtgacgtattcaataacgccaccttcaccgggacatcgcaaaacgcaggtgtagagctgaccaacgtgaccctggcgggcaacctggtcaaccagggcaaaatcaacctgacggctgccacccccaccgacttcccgtccggtatcgccatgaccctcaattccaacgtcggtggcgacttggtaaataatggcgacattacggtgagcggtgacgccgtcgtcgggctggacctgtatctggcaaagatcgctggtgaagtgaacaacaacggcaacatcactgtgacaggcgccaatgccgaaggcatgctgatcacctcgtcccaggcgcgcatcaataactcgggcactatcaccgcacgtggcatcgactctgtgggtatcgacatcgagaacgcacgctttacgggtcagatgacgagtggtatctacaacagcgggactatctccgcagacggggtcggtatccgctttcgcagtctcgacacctccggcggttccgacaccctctccatcaggcagacaggtggcctgatcgaaggcggcagcgcagccattctggcggacgacaatgccccacgttcgtatttctactgggagggtggccaggtcaagggtgacctgctgggcctgagtggtgtgctggtgcgaggggacgcgatgttcgatggctcgaccatccgcgccggttacgtcgatatcggcgatggccgcctgacgctgcttcgcccgcagaccacgattgtgggcggcctcgacctggacagcgccaccgcgcgcctgcgcctgctgctggacaacaacacactgcccaacacgccgatcctgaaagtcactggcaataccttcttctctgcaggcagccagatcgaattgcaggcgcgctctgatgacttccgcacgtcggcccagggcacgcgctacaccttgatcaactctggcacctgggaagacccgcagaacctgtccgtggtttcctcctcggcgctgcttgaggtgaggagcttcggcatcgaaggccaggacgtgaaagcactggttgccacccgcagtgatgaggtaatcacgcaagacctgatgagcgcccgtggttcacgcaacgcggtgagcgccatcaaaccattcaagaacacgctcatgggccaactggacgaaagtgacccggtgttccagcaattcgccaacgccgcctccagcgaagaactggccaaactggccgaaagcctgagcccggacgtcagccgtggcgcgatcaacgcagccaccagcagccagaacctggtcgccagtaccctcaaccgccgcgccagcaaagcgcgtagcggcctgtcctccggtgacgtgctggccggacaaggcgtatggctgcaggcactgtccagcgatgccaaccaggacagccgcaacggtatcgacggctatgatgccaacaccaacggcatcgccgtgggcgccgacggcaagctcaacgccgataccacagtgggcctggcttacagctacctgaccagcgacgtgaaaaccgaccagggcaacaagaccgacgtcaacggccatgcactgaccctgtacggcaactgggcccgtgacaacttctttgtcgacacctcactgatgtacggctggaacgacaacgaatccaaacgctacatcgccggcacccgcgccaaggccgactacgacagtgagattttcggcgtcaacgcgctggcaggctacacattccagctcgacaaacagtggctgctggaaccacaggtcggtgcgcgctatgccaacgtatcgattgattcgtaccgtgaaaaaggcagctcagccgccctcaacgtcggcagccagcgctatgaaatcggcgaaatgggcctgggtgctcgcctggcggccgcttttgacgtaggtgtgggcagctttgaaccggaagccaagctgatggcctggcacgacttcatcggcgacaaggccggcaccacctccaccttcgtgcttggcggtaccccgttcaccaccacaggcgcaacaccggcgcgcgacagctacgagttgggactgggcgccaactaccgcgtgggcgcgtggagcgtgggcgggacgtacaactacctgaccagcagcggtttcgacgccgacaccttcactgcgaacgtgcgttacgacttctgatcaacgtctacgtctgaaatgaaaaaaccggcctaagccggttttttcgtacagcgctgcgggatcactcccactctattattaatagctaagtactgggccttaaaaatgcaggcattaaggccgtgcgcaagggtgaaaccatgaaaaataccatgagcacgattttattcccgagggtccaaactgctggaagctacggatttcaagtcaacgtgagtgttcagctgacgaaacacgacagccagctcatcgccgtcgccacctctacggacatccgcgattaattcaatcacatacgacggatctctctgaaaaagctctgccattgcctcatcgtgactgcgatctttcatcacctacctccgcattgagcgcgagcaagccaaatgctcatttgatccttgttgattttcttagcatgtttgctctgtctaaacggctcgcagacattgcattttaagcccgctatcacagcgagaggcatgcgccactagcggtagaccaatgtcaacgggcccccttggcctgcatagctttaccatcacagcccccctgggaacgatgctgccacagaaacctctggcatttcagcttcttaaatggtgccaaattgatatgatcaaactctgatcggtctctcgatgaatgtggccgatgagatccaaactgatgatgcagtcgacctgaattctacggataggagtcgcccatgttgaaccacgaagccaaacgaataatcgatgcggaaataatcccgaaaatggagaccgggaacctaactctgttcttgggtgcagagacattcgctggcacgccatccctaaatggcaaaggagttccgtccaccgacgagcttataaagcgaatttttgagtcggcaggatatcctccagaggaagccctgctaaccgactttcctactgcttttggtgcgggccaggacgacatcgacgactttgataattttttaacatcaaactattcggttagctcagtacatacttggcagacggacatattcaaactatggtggaaaacaattttcaccacgaatattgacaatatagcaaacgaagcattagctcaaaacaagagatcaggacttagctatcccgattataaaatatacaattactcagatagtgaacctgttcatgcgatacccacctcaccgccaatcgtatatctgcatggtacagtaaccaacatttcagccggtgtaatgatcgacggaattagctacggaatcacctcttccaaacaaagcgaatggctgaccaagtgcgcattgaacatcgaatatggcaactgtctatttatcggttcaaaattcaaagggtcagctatagatagcgccatacgatcaaagagtgccgcagacagttttaacagcagggaaccaagctgggtagttggagaaagctttacacaaatagaaaaaagccactacctacgaaaaggaataacgcccctagtagctgatgctggcgattttttttcgtacttgaaatctcaaataagccacgtatccccagaaaagttcttaaaacgtaaagccccttacctagcaggcaatgcaaaccgctccatcggatggttttccgagaatttcgaacacattcctacaaagttagccttagctggcgaagaaagtggtccatactcacgattttacatgggcgacttaccagaatggttctacgtgtcgcatcatgttccggcagtactcccagcacacagagccatcgtttccgaggttaatgcttttttaaatagtgactcaaaatgccgacttatcgctgttacaggaccattaggatcggggaaaacaaccgcatgcatgatggcagcagccgagatctcggtcaaccatcttaacgtgcatcactttaacggtctaaacggtatagaaattgagcatctctggaacactattaaagacacccgcggcctattctgtttagtaatagatgcagcatatgaacatttctacgctgtaaacgccgtttttgaaaggataatggatagagcaacctcttgtagattatgcgttattatagaagaacgaactcgtcaatatgaaagaaacaaacatcactttatgtcaagccaacttgacaatattcgccaaatcaaagtagaaaatcttaatttagcaagtgccaccaaactttatgacaaatcgttcgagttgggcataagattcgaaaaattaataggcaaaacaagaaaaaattcaatcaaagaaattattgattttgacaaagggtataaaggggatctccttgcaactttgtacgatttatcatcacgcaagtcataccgagaaaaactggcagaagagtatcgagaaattgacacccaggaagcccgcgaagtttaccaaacagtagcattggtgactgccgcgcgcctgccactaccgctaaacttcattgctgagactcataacatatcagtatcaaatttagatcgaataatttcagatggtttgagagataaaattcatactcacggcgtagctcgtggcgtctctgcgcgacatcattcgatcgcagaatatcatctcgcttataacattccgcaagaagacatcaaaactcgtcttattaacttgatgatatgcctcgcaccaaagtttacaattgaagacataaaacatcaccctttgagttacaaaatatatcgatccacactctccttccactatttgacggagaccctattcagagggagaaagaattattcatacatacatgaaatttattcgaaatgccaaaatctgtttgcaagcgacggcgtattttggcttcaatatggtcgttttctagaaaaagatgctgatatagaaggggcaatccactgctttagaaaaggtttgggactttatgactcatttcaagttcgccatgctctagggcaaactctgttaaaaaaatatatcaagaatgattattcagaacgtgagctgtacgaggaagggactgccatactcctacgggagatcgaaatgcgcgggcaccacgatgtataccccttcacttcgctagggcagtgcttaattcagattgtcgaaagcaacccttcggacgaagattccttgaacatgttaaaaactgtagtaaataggggcataaaacatcaccaggccgacagtgtttttatggatattttgaagcgatacctcaggttcaacccagacatgacaaacaactaatcgcctccccaaagagcaactgcaagcaaattagttgctcttttaaaactaaaaatcgtctatttatattagattacattgacacggaaagcatcatgattcttgctcatatattcatagcagagcataaagcgttacgtagaatcaacgtcccacttaacggcagctttcgctgcaacttccacaatagcatcttgcatcttagcaaaccgaaaaataccgctgaatattatcatgatcggtattgctcagctctgattggtcccaatggagttggaaaaagtagtgttctcgatatattggaaacattaaacggcaccagcgactctagtgccttgataattttctttgacgaaaccgaagaaaaatatcacatctgcccaatcaacatctccccaaaggagatcaaagaaacaacttgcgacaaagaattcgtatttgtcacaaacagtgcccaattcttatcagaccacaacataaactttgttaaaataaattcaatatcttcgagtgaagatacactaaacttcaaaaaaaccaaacactccccaaacattcacaatctcaccatatatgaaaatgtcaaaaataacgcaaggcaacgtaaatactttgaaaaactgttggcatacttcagagactccttcaacagagaagagttcatggaagagattgttttcgaattcgttttctctagctcgcctattactattgccaaacgaagtatggagacgatagcttcagaaaaagaatatatagaaaaatggataacttacgaacctcaattcgagttatcagacagcgaaatctcacacggcgcagtatttcaaaaactaattgaacttaacttcctatcaatatcaagtgctctagccaaagcttcgaacgccgaagaaaagactcttccgagcatactctttcagtttgacaaaacgtatcatgtaagccctatcggaatgagcacttctaataggctccgaaaagctatcaaagatttagagattgcagattggcccgattttgtacagaactcaattaatcaaggagaaagtgaagaaccattctccaaagatcagattaattttggaaacctccaagctttacttgagaactacctagagattttcgaagaaatagcaacaattctattcgactattgctatgacggcgaaaaacttaacctcaagagtgtaaagacagactattacgatgctgtgcaggatttgaccggtgcgattaaccgtctgccttcgaatattgccaacaacatatcctggggttggcgtggtattagtagtggcgaactagctagaacccacattttctccgaaagctatcactacctaaaatcaagcgattcaaaatctaacaccattttcgtctttgatgaagcagatctgtacttgcatccagaatggcaacgtacatttatccaggaaatgcttgatcacctgagattaatagaagccagccgagatattaaaacctcgcagattgtcatttgtacgcactccccaataattatcagtgatttcctgcctgacgacatagcttcattaacaaaaaatgaagatggcgatatagtagtgacaaactcatatggattcggcaacagtatcgtagatatatatataaaggggatgcatttaacctctacttttggagagcatgcacgtcgcaaaatcgagtatcttcttagaaaagcagaacaaagtacactcacctctgatgatagagaattgatctctaatataccaaatcctaacacaagaaattttcttttaaatcatgataaagatcaataaggctttctcatccgacttcaaggaaacatacgttcagtatgctttgaacgtagttctttggcccaacatttcaaagctcgttgaaactatccctcacattcataggaaactagctaagcaaacattcgataagcgctttcttgaggttttgctaagaagcgaacccgcgtcattcgaggacatcattcaaaggctgtacacgctattcccctatatagctgagagatattgctacagctacctactaaaagaaattgatatcgcaacaaatattatcaacatggcaacagactctccctccgacaggagtgagtttgacaaacttgtaaaacgaacaatccaacaattaaaaaggttaacctcaagatatagactatatcttaccccattcataatcgccgagcttgaatcaagcattcctcgatacaaaaaaaagaaatacttgtgtagattagagaatgcttgccgcggaaactctcagataactgagcgtgaccgagcacttttccctgcttgggtcaaccaacttcccagctgtttcgattatgatgcggtctcacaagaacttggtcaagccatcacagaacagttagaaattacggtttgcccatattgcggcctggagtcaatacaaacatacagctccatatctgtccgaccagacttggaccatttttatccaagaacccgcttcccctttctcgccatatcactttataacctaatccccgcaggctctatttgcaatcaaaaacttaagagaaacaattcaatgttgggacatatgcatcctcacattgaaggcttagataacgatccaatgtttcggtttggcttccttccggacggagatatacgcagcactttctgtctagacatcctccagcaaaatagcaatgccaaaaataataacttaaagcttttcaagataaaagggatatacaatgggaatgaagatcttcgagaatggtactgttgcacttacgagcttcgcgagttccttaaacaagaaggagaggagctgagtaatattgatttcatgtcgccgctttataaaagcgtaatcgacatacgaagacctaatacaaaagtttccgctcaaaaattcaaaatcgaagccctgaatgaactttttcaccaaacgttatgcatcgttgaccagccgatactatgagagggataatttgcacatatttagtagttaacaatacgcattacatactcgaaatcagatacgcgcattaaccataatctccactatattcatttttactgccaagccgatacaatctagaacttgtatcggcttggcttttatattaaaaatataaagtgaacgacggaatagctccccacaattctcctctgttaatatcgacctccccccagtcatctttctcggtgtctaggacagagcaataagtcctagcctaacgaacggtcgcaacgatatagcgcaccaatcgggtggggctgtgtgttcctttacctctcggaccccgtttggcgatcatttgacaacccgcgacataattgcgaggacttcggtctgcaacttccgaaagtcgtccatcatcgcttcaacgtctgtcggcctggcaccttggccgcgcttctctacgagccagagtttcagcagaccggcgacccgtccgaggtcgccgtttaccttagccaaatcggccacggcggtcaggtcaacaacagaccgtattggcgagttcatcccaagggcgcgaaggtagcctgaacgggacattccagcctcgatagcacgctcagtaatcgcctccttttcctcatcagtaacccaaacctcgattggcttgccacgccgccgagcgggtgctttttctttcgtgcctgatggcatgatcgctcctgttgctgctgtgttttcgctctcagacgcggcagcggctgtgggctttgcagagcaaaatccgttgagccgaaggcgaataagggtaggtgttgggagggggcgggcttgcccgtacccgtacaacacacatcttgccgtctgatcttctgcaattctaggcaacttgcccgcctcaggttcgccttgctgccatttccggttatttctgacctataattgccctgaatttctctgagttgcgttaaatttcgctatgaagataaaaaatttactttaattttctaaaatttcctttagttgcctatatcaggtgccgagcagtagttcgatcacataatcaggagacgccaaatgacagacgggccgaaaaaggtgtatcgcggcgcagggcgagttgcctttctggccaggcttgatgactttcgtaagctgatagacgcagggcatccgctacgtgcgatctatgacgattacgccgaacagcttggcattggctacccgcagttcaccaaatacgtctgcaggtatgtacgaaaggaaaaagacgatgggcaccaaaggaaaggctctgggcaattgacatcgcaaagcctctcaccagccccgacaggagtcgtaagaggacagccggagcacagcgccacaccgccttccaaacccggctcaaaacgtgcgggattcgaccacaacccaaatagtggaaacactcgggacgacctgatctgacgctccacgaaacagcgaggccgtgtagcccctttaatctgggagcgaaaatgaggtagaacttttcagtctgtataaatttacctcattaaaaacggtgaacccatggctcgaaaaactctcgcagaacgccgttctgacgccctttcagagctggaaacagctaaagcaagattggcgaaattggataatgaggcggctgaaagaattggaagaattgcaatcaaatcaggattggttaatcttgaaattacagacgatcagattcgggaagaattcgacaatattgtagaaaggatcaggaagggggattgattatgaaaactgctcaccgcatcagcgcattggccaaccaactcaacgaactgcaagcctacctcggtcaagccagcgggcgacctagtaaagccgttagagaagcccaatgcattgcggcagagttggcttcctcgctcgaaaactggcacctagaaacactacacatccctgaaacggagcgtggtcactatcggacccagaccccctattactcagcccactaatgcgctacgccatttcatcaaaagcccacttcggtgggttttttttggccgtaaaaacacatcacgctggaaagacagacaggtccaagcataaagaaaatgccagaaaaattaggttgctacgtgtcaatcccacccaaccatagcccgtaacccattgatttctatgcggatagatacttatccgcatattccaaaccacaccaaatttgtcaataatcaaacctcgaaccatgacaaaacgaggtgttcggcatgaatacggaattgctgaaatcgccgatttcatcggctcggaaatcgagaatacgaactgcccttgttttagcaatgaaaagcacaagtcttagtgtgggcctttacttggccccctcacctgcgtatgccatctactgctcaaactgctcgacgttctatcaacagatgtttgagtacgccgaggcagtcaacacagcgttaaacactgccgagcaactacagacgcagattcagcagtatcagaacatggtcacccagggcacgggcttgccaagcaccatgtttggcagcatcgcggccgaccttaaaaacgtggccaacatttacacccgttcgcagtccctaggccgccagatccaaaatatggactctcagttcaacaccgctttcccaggcttcgagtcctacctgaatcaagcagcgaactcagcaggagttcctgcgcgggatcgatatcagaagtggtcggaacaaggcagcgacaacataaagacggcacttgaggcggcaaacctcaataccagcacgttcgagtctgaagacgtccagcttgatcgcatggtggcccgttcgcagtcagccgtaggccgcatgcaagctatacaggcaggcaacgaaatcgcctcgcagaacgtgcagcaacttcagaaactgcgcgatctgatggccacccaaatcaacatgcagggcaactacattgcccagcaaggcgaccggaaggccgctagcgaagcagttgaacagcagttcgaagcgcgcaaaaacatgcgcggcggcgtgaaggagtactgagagtgactatttcgagatggctcatcgtgttgatgtgcgccgggtccgctttggccggttccctggtcaccgtggtagttcaaagcaacagcaaatttaatgccgtggctgagcaacaacggcagcagcgtgacgctgatgtctcatttgaggcgcgcccgaacactcgcggcggcgtgaaggggtactagcgatggatcgtcgtctgttgttgctcctcgccttggctggtgtgttcgtgggcggagatgctgtggccgcaaccgacctttcccatgccgatacatcgattcagggtctactcgacctcgttttgcaacagtcgcaccagtggtcagggaagctgtatgactatgcgatcagactgttctggctgctggcctcgatccagttcatctggacgttcatgcctctggtcatgaagcaagccgatttcggcgagattgtcggcgagctgctgcgcttcattctggtgatcggtttcttccttgcagtcatgaagtactcggtggaatggtcgacggccattgtcgatagcttccgcgatgcggcggcatcggcgagcggcctcgggcgtgcattagaacccggcgatatgctggcagttgcgctggattttggccgcaccatggtggagggcatttcagtgttttctccagccaagggacttctgatcgctgtatgcgcaatccttgtgttggcatgcttcgccttcatcgctgcattcatgtttgtcacgctcgtagagtcttacgtcatcatcaatgcttccgtgctgttcttcggctttggcggttcgcaatggacgcgggattttgcaattgcgccaatgcgcttcaccgttgcgattggcgccaagctatttgtactaaccctgattgtcggcctgatcgtacagtcggcaaaacagtggttggccgcctacgccaatgacgaagcgtcattgatgacgatggtcggtttggccttagtgtgctgttacctcacgaagacaattcctgacctgatcggtggcatgattagcgggacgtcaatgggcggcggctcggccattggtgggatggctgtggccggtgctgccggggcggcggctgcggcggccaccatcgccacagccggggcggcggctcctgccgctgccctcggtgctgccggtactggtagcgcagccggggccggggcggcgggtgtcggtggactcggcggcggtctggcgggggcgattaactccagctttgccggtgccagctccgcaggtggtgccgcgtcgtctatgggttcagcggcgtcctccggcgtgggtgccagcaccggcggcgcagcggccaagggtgccagttccgcaggcgcgaaggtcggcggcagctctaccaattctcccgggcaggcgtcggccgcgccgtcctctccaagcagcggcctacagcaggccgccaagcaggccggaaagaccgcgcagggcaacgacgacaaagaccagcagacgacacccaaagggggagttgtcagctccggcagcgcactttcccaagcggccgacggtggcgcaaagatgctcggcgtgatggcctcaatggcagtgccaggtatggagaatgcgcacgccttgtctcttggtgcaggatctcccccaccagttcccgacgataccaactcgaccactccagccaatggagcagaatcggccacggaagcttcacacgctgagcctaacgtcatccgtccggcctcggacactaactctgctcccggccgcctcgcctcgctcaaggtgccgggaatgacctcgaacgatcaaccggagaaataaccatgatgggctttctgatgttcgctggattcgtagtattcgcctttacgttcgccatcggcatgtgggcactcggccggtggctacgaagcaaaggttacgggccacagctagataagctggatcggcagtacacggcattgcagcttcgagtaagcccgctggcattgtcggcttcctatcgcatgtttgccggggcgcataccctgaatcgtttgcctctgctgggcagtaagagtagcggcgttctgaaccagcagatgttgatggccatccaagccgcgcaggaagcggagagggaagaaaagcgcggcaagcgctaatcgctgatcgctgagcagccccacactaccccgcctcagtgcggggtttcgctttccacacgcagcggctaagtatgcccaatttggaagaatcaggagacactttcaccagcatcacagatgcggtcaaatgccgggaagctccgccctcagtaatacgcacgtacttgtctcagccctatttattacacctcgctatgggttatacgctgcgttatggtcgatgtttgggacaccggccccctgatcatacatgagcttccgaggcgttttctgaggggttctgacaagcgtaagagatgattcggctaccgcccctttccttcgggtctcaattcaaagaccgcaggaggcacgacgcgccagtctcttgaagatgcataagttcgatgaagcaatcagccctttctttttggtgccaaacgggccgaaggccgactggcaaggccggaccgcgcctcaagcgcgggctgcgccgcgcaggtactgaatatcctgaagatcctgctaaccccgggcggatgtggcacgtttcgggcgggtgtgacgcgttaccgggcgggtgtgacacgccatcgggcgggtatggcacgcttcacctgctaaaagcactgcttttcttgatgcgatcaccatcaagcacaagtccaattatcctcagatcttccgcttcctccttaagccttcgtcgcgcattgcgcatgtcctgacttgaggcttttccggctactgccacgataacggtgtctagataccaaccgcctgtcggcactactttgtggctcaaaacgtgccgagctaccgcttggcttatgccgtgctggaggcgcgcaatgggggccgggtcatagtagagactcagatcatgctcaaggagcattaccagcgcaattccgagacgcacccgccataggtttcgggctccccctgtcagaggatcaggacgtgtcatgggcgaaggtataacgtggtcaatcaatccgccgatgattggaaaatcaaattgcggcgtttcaatcgttatcgttgcggctctcagttcggccagcagcttttcgatctgtgtgaagctgtagcggctatcggaaagtgtctttctcacacgcgcgggatctaccagaagttctacgccaccatctgagacagaccgtcgacgttctgcgcagtacagtacagcttccagtatgtccgcgtgcctctgccctagtctgcctgtcacgcggcagcgcccaaatgatgtttctgcccaattaccctcgcgcagttgcgggcgctggctaggctgataaagcatcactctggcctgtgcgatagaactggtgggaaccacggcgttaccaccgctcatcgtcacttccgtttacgacttgcagcgggctacctttcttcatttccgccaactcaaccggcacaagaacgccgccttcctggcgctggtaccattggtcgagcggggtggcatcgtagttctgcttgctaacaccgaaacgaacaaaaaaacctcttcggtcgttaccgatgggctggcgatcataggcgcgatcgctgagaattttggcctgctcctccgtcatctttgcgacaaagccgcaccagcgggcgttgtcgattagagcggatgcgcctcgtgctgcctgttgctgatcggtttgcccctcgcgggcgctgcccttgctgacatggtgcaggtacaagactgatgccccagtattggtcgcgacgtgctcaagcgtggcgactagccgtgacatgtcgccgttgctgttctcgtctcggtcgtgaattcggcttagggtatccagcactatcaaccgggcaccttcgcaaaactctgtgatacgagcaagatgccgatcatccatgacgttcagtcgtttacccatgatcgactcaagaacgaggttcttcgcgatggactcgcgtgcctgctgatttaagtgctggcctatggcatggatgcggcgcaccaatgcgacttccgggtcttctccggcgaaatacaccactcggccagcgcatgagggggcaagccctacaagatcaccgccggcaacgctgcatgcgatagccatcgccgcttccaacgcccagaagcttttccctgtagctccgggagctaccaatgctcccactgtgccagcgaggaagccgggccatatgaagtccagtgtgggcggttcgttctcgaatgctgcccgtaagtcaatcgccacaactcaagctcccattccgggacgcgtggccgggccggattgcctgcacgtatcaatccatgtctcgacctcttccaaatcccaaacgaccttccggctgctaacggcaatacgacgagggaatttcccctgcttttcgaagttataaatcgtccgctcacacaaggggatcattgccagcaattgctttttgctgatgagcactttgctcgacttcctcgattctttttccacaccgaactcctcgttttgtcgcatttgaggttcgattattgccccatatttccagagcattccacagatatttatggatttattccctttaaaatcagcatcttactgtcctgcaaacgtatagtttcgggacaaaaaaacaacgcgatgtcgttgttctttcacaagtttttttcgtcaaagccgtcaggaaaaatgtgtcccacaaacgggtagtttccggacagaaaaaaacccacaaatgtgggtttcttgatagaacaaaatagatcagcgctcgcttatcccattaccaaaaacgaaatcaactttctgagcgcgtttttttgcgcgtccattcatcaatcatatccgcccaatcttgcaacatcgcccgacgctgatcacggtattcagccttgttgtaaacggcccgtacccccttctgctcgtgcgcaaggcacttctcaatccagtctgagttgtaacctgcctcatgcagcagcgtgctcgctgtgcgcctcaaatcatgcggtccgaacttgctcagcggctgcccttctttctgcgcaagccggtacgtgagcgtcagcacctgattgatcgtcgcggtgctcattggcaaatcagaatcgtaccgggagggaaagacgtagtctgaaccgccagcaaacgtcttcaacgcaatgaagaaatccaaagcctgctgagataagaacaccaaatgaggattacggcgcttcatccgctctttcggaatgatccacaaggcttcgctgaaattgatctcgttccaggtagcgttggtcaactcacttttgcggaccatggtcagcaataacagcttagcggccaccctaacggaggaggcggtgccgatacggtccaggtactgatacatcaacgcgatttcgtcaggccccaaagcacggtcacgtggctcgaatttagcgatgcttgcaggacgaaccagatcagccggattctcgaccttctggccacgctctatcgcccatcggaatacctgcatcacaatctcgcgggagtgaacggccgtggcgggagctccacgctccacaattgcatcagtcagcgttcgcagatcctcatgattaatttccaccagtttctgattaccgaagtgcggctttagctcgcgctcgtaaaccgatcggcgcatgtcacgcgtcgagtcagccatctgatacccacgcagccatttctcagcccacgcatcaaacgtctctgcccctttggtgcgtgccttggcacgggctttctctttggcaggtgacttacccgccgaaaccatctttttagcctcgcccaggcgctctcttgcttccgcaagtgtgatgccacccacgccataacgaccgaacgtgatggtctcctgacggccattgattgagtagttgtaacgaaatgagatggaaccggcagcagtgacggccacgtacagcccgtcacggtcgttcactttgtagagtttttcttgcggcttgaggttacgcagcttggtatcggtcagcatggcagttacggattccatggaaaaaataccatgctcagagaagcactcatacaccgcgataaaacccaatggaaccgggctgatgatgagatttgataccatgcccttccctactagggcgacatggtatcgagcaccgaacatggcatttggctcagtcaatgccccgtaccatgccatacaaacacggtgcttggcgatgcacaaagctgccagaacttgccagacccaaaaagccaaaagcccgcaattacgcgggctccagggcacttcttgctagatggtgccggacaatgccggacgtccaatcattcccactcaatcgtcgccggcggcttgctcgacacgtcatacgtcacgcgcgaaatgccttcgatctcattgatgatacgaccgctgacagtctccagcagctcgtacggcaggtgtgcccagcgggcggtcatgaagtcgatggtttctaccgcacgcagggccacaacccacgcgtagcgacggccatcgcctaccacacccacggatttcaccggctggaacaccacgaacgcctggctgaccttgtggtaccagtcggccttgcgcagttcttcgatgaagatgtggtcggcgcgacgcagcaggtcggcgtattccttcttcacttcaccgaggatgcgcacgcccaggcccgggcccgggaaggggtggcggtagaccatgtcgtacggcaggcccagttccaggcccagacggcggacttcgtccttgaacagttcgcgcagcggttcgaccagcttgaggttcatttcctcaggcaggccacccacgttgtggtgggacttgatcacgtgggccttgccgctcttggcgccggccgactcgatcacgtcggggtagatggtgccctgggcgaggtacttgatgttgtccagtttgttggactgggcatcgaacacgtcgatgaaggtgcggccgatgatcttgcgcttcttctccgggtcggactcgccggccaggttgttcaagaactgatcttcagcgttggcgcggattaccttgacgcccatgttctcggcgaacatggccatcacctgctcaccttcgtgcaggcgcagcaggccgttgtcgacgaacacgcaggtcagttggtcgccgatggctttgtgcaacagggcggcgaccacggaggagtcaacaccgccggacaggccaagcaatacgttgtcggtgccgacctgggcgcgcacctgggcgatggcgtcttcagcgattttcgaaggggtccacagggcttcacactcgcagatgtcgaggatgaagcgcgacaggatgcgcccgccttgcttggtgtgggtcacttccgggtggaactgcacgccatagtaacgacgctcatcgctgaacataccggcgatcgggcagctcggggtgctggccaggatgtggaagtcctgcggcatcttggtgaccttgtcaccgtggctcatccacacgtcgaggccgaacaggccgtcggcgtcgacgtggtcttcgatgccgtccagcaggcggctcttgccgaccacatcgacacgggcataaccgaattcacgcagctcggaaccttcgaccttgccgcccagttgttcggccatggtctgcatgccgtagcagatgccgaagaccggtacgcccaggtcgaacacggcttgcgggcaacgcgggctgttggcttcgtgcacggactcggggccaccggcgaggatgacgcctttcggtgcgaattcgcggatcgcttcgtcgtccatgtcgaacggatgcagttcgcagtacacgccgatttcgcgcacgcggcgggcgatcagctgggtgtactgggaaccgaaatcgaggatcaggatgcggtgggcgtgaatgtcgagggccatgaagtcagtctcgtctaatgaatcagaaacaactcggggctgaagaacagccccggttacttaacattttgctggaagcatcaacctacacggtagtttggcgcttccttggtgatctgcacgtcgtggacatgggattcagccatgccggcgccggtgatccgtacgaactctggcttggtgcgcatttcttcgatgtcggcgctgccggtgtagcccatcgaggaacgcaggccgcccatcagttgatggatgatcgcgctcagggtgcctttgtacggcacgcggccttcgatgccttccggaacgagcttctcggcacctgccgaggagtcctggaagtagcggtcagaagagccttgcgcctgggacatggcgcccagcgaacccatgccacggtaagccttgtaggaacgaccctggaacagttcgatctcgcctggcgcttcttcagtaccggcaaacatcgagcccatcatcacgcaggaagcaccggccacgatggccttggacaggtcaccggagaaacggatgccgccgtcggcgatcaacggtacgccggtgccttcaagggctgcggcgacgttggcgatggcgctgatttgcggcacgccgacaccggcaacgatacgggtggtgcagatcgagcccgggccgataccgaccttgaccgcatccgcgcccgcttcggcgagggccttggcggcagcgccggtggcgatgttgccgccgatcacctgtacgtcagggaagttctgcttgacccaacgcacgcggtcgatcacgcctttggagtgaccgtgggcagtgtcgaccaccaccacgtcaacaccggcagcgaccagggccgaaacgcggtcgccggtgtctttaccggtaccgaccgcagcgcccacgcgcagacgaccttggtcatccttgctggccagcgggtaagccttggctttttcgatgtcgttgacggtcatcatgcctttgagggcgaatttctcgtcgacgatcagcacgcgctcgatgcggtgcttgtgcagcagttcgcgcacatcgttcttgtcggcgccttccttgaccgtgaccagacgctctttaggcgtcatcacttcacggacggtgacttcaagacggttctcgaaacgcacgtcacgggaagtgacgatgccgaccaggtcgccatcgtgcagtaccggaacgccggagatgttgtgcaggcgggtcaggtcgaacaggtcgcgcacggtggcgtcggcttcgatggtgattggatctttcaccacaccggcttcgtaacgcttgaccttgcgcacttcggcagcttgctgctcgatggtcatgttcttgtggatgatgccgatgccgccttcctgggccatggcgatggccagacgggcttcggtgacggtgtccatggcagcggaaaccagaggaatattcagctcgatgccacgggttaggcgggtcttgagactgacttcgttaggaagcacctcggaataaccgggcacgaggagaatgtcgtcgaatgtcagagcttcttggctgatacgcagcatcgcgggggctcccgagcgggaaaatggaagcgcgccattatatacatgcaccctgtcgggctcaatgtaaaactctgacaaacttggtaatactgatagatgggtaatttaactgtcccgatcgttcccacgctccgcgtgggaacgatcggatcaggagggttacaactcgactttgacccaactcatcttctggtccagccaatcggcgaattcgtcgataaaactctgcttgaaccccgcttccgcccagttgttgaagatgaatcccaggttggaaaacccgcattcctgcaggaacaggaacccgttgatgtcgtcttcatgcccacacagcgggcaggtgaagttgtcggtgtggccgggcatccagtcttccaggctttcgaacagcgcttcgccgacttccttgcggcattccgggcaaccggcttcttcgagaaagcccttggccggcgtgtagatgcagcgcttgtagatgatctccaggccattgatcggctcgttgaacggcagtgcctcggggtaaagcaccacggcacgggcgccatcggccagggcgtagcccatgcggttgccggtgcggccacaggtggtcagctcttccttgatgatgttcttgcgcaccagccagcgcacgatcgcccgggcgcggggttcgtggacgggcaaggtggagattttcgggacaaggatgctttgggaattcatgggagtcctgcggtgtggccacttgcccccgaagaggccctgaaggcaggcagcttaatccctgaaaagaacaggtcaagtactcaaataccgcccgatcaatgcaataccgctggtcagcaccagccaggtcaccagccgcacaaacgcctcacgcgacatgcgcatcgtcaacctgcgcccacaccacagccccaacgccatcgccggcaacaggcacagtgccaacatcaacaacggtaaatcagcatacaccccggcgatcaggaacagactgaggcgcaccaccgtgctgcaactgatcaacgcactctgggtggcgcgcgccgcgtctttggacaggcgactgttgaggtagatcgcatataagaagccaccactgccgaacagcgccccgaacaacccacccaccgtgcccatcggtatcgaccaccccgccgccagttgcgtcggccgcgccttcaccgccaggctgtagagcgcgtaggcgctgataaacaggcccatcaacaacagcagcaggtccgaatgcaagttgagcaaaaacaccacgccgagtgtgcagccaaccgccatgcacggcagcaatcgcagcaactccggcttgttcacctcgcgccgcgattgcagcaggttgccaaatgccgcgacaaaatccagcagcaccagcaaagggatgatctttgacagtggcataaacacgatcagaatcggccccgcgaccagcgccgtaccgaagccagcgataccgaacacgatataggccacgacgatgcccaggccgatcaccagccaatccacagcgccaaacgaccactgactcatcagctcaaccgggctcatggggtattccttgtacgagatgatcatcactttagccatcggtgagagatgcgactaatatcttcaaagcccgccacctatctcgaaaaggcatgacgcgtgatatcaacccgccaactgcgttacttcgtcgaaatcgccgactgcggcagcttcagtgccgccgccgaacgcctgtttgtggcgcagtcagccttgagccgacagatcaaggagctggaaacccagctgcaaaccccgctgttcgaacgcaccgcacgccaaccgaggcttacggcggcgggcgaagccttctatccgcgagcccgcaacctgctgagtgaactgctcaaggccagccaaatggcgacacaagtgggcaatggcgaactgggcacgctacgcctgagccattcgagcactgtgccgatgagcggccctttgctgcagggcatcagcgcttggctggaacgctgccctggggtgtcgatggacatcgtcaaactgtcctccgaagcgcagttggaagaaatcgccgaaggtcgccttgaggtcggcgtgctgcgctcgccggtgctgcgccagcgcgagggggttcgggtgatgcctttgtatagcgagcaactgctgctggccgtaccgcccaaccatgcgttagcgcgtagtcaggcgcccatcgagctagggcaattgaaggacgaagcgtttatttcaataccccacccccagcgcggcggcctgagttatctatcagccgagctatgcatgcgtgccggatttttccccaaggccgcgcgcgtgatgtcgcgcaagaccacccagttgcaattgatccaggccggcttcggtattgccttgttaccaaaatccatgcaggacatcgcccccgccaacgtgcactttttacccctggccgacccggactgcctcagcaccgtggccctggcctgcgcacaggcgccgagcgcgctggtggagcaattctgtcaaaccttgcacgaatgcctataaactgccgcccatgattaaagatccttttgctcgtttaggcctggaccgcgaagtcctgactgtcagccagctcaacggccgtgcgcgggtgttgctggaagacgtgttcaccaatatctgggtcgaaggcgagatctccaacctcgcccgcccggcctccgggcatgtgtatttcacgctcaaggacagcggcgcccaggtgcgttgcgcgttgttccgcaacaacgctgcgcgggtgcgccaggcgctgaaggatggcctggcggtgaaagtgcgcggcaaggtctcgctgttcgagggccggggtgattaccaattgatcctcgatacggtggagccggccggtgatggggcgttgcgcctggcgttcgatgcgctgaaggaaaagctcagcgccgaaggcctgttcagtgccgaacgcaaagtgccgctgccggcgcatcctcgacgcatcggcattatcagctcgccgacaggcgcggtgatccgcgacatcatcagtgtgttccgtcgccgtgcgcccaacattgaactgaccctgatccccaccgccgtgcaaggccgcgaagcgatcccgcagattgtgcgcgcgctgaaactcgccgatgcccgtggcttcgatgcgctgatcctggcccgtggcggcggctcgctggaagacctctggtgtttcaacgaagaagccgtggcccgtgcggtggacgcctgcgtcacgccgatcgtcagcgccgtcggccacgagaccgatgtgtcgatcagcgacttcgtggcggacgtgcgcgcccccaccccttccgccgcagccgaattgctcgcgccagacgccagccacctggtgcgccaggttgaaaacctgcaccgccgcctggtgctgctgatgcgcaaccgcctgagccacgaccgcctgcgcctggaaggcatggcccgacgcctgcgtcaccctggtgaacgtctgcgccagcaagcccagcgcctggacgacctggacatgcgcctgcgccgtgccttcgagcgcagcctcaatacccgccgtgaacgcctgatccgcctggaaacgcgccttgccggccagcacccgggccgccagttggccctgttgcgccaacgcctggacagtctcgccgaacgcctgccccgcgccatgcgcgaaggcctcaaggcacggcgcctgcaactgcaaagccagatgcagacgctgcacgtggtcagcccgctggcgaccctgggtcgtggctacagcatcctcttggatgaacgcggccaggccattcgcaatgccgcgcagacccacaccggccagcgcctgaccgcgcgcctcggtgagggccaattgcaggtgcgggtggaagacaaccacctgacacccgtcaccctttcgttattggattgattgatgccacgtctctttagtgtgttgatgctgctgtgccttgcctttaacgcacaggccgacagctacattacccgaaccctcaacaagcccgtgcctggcggggttgccgtggtcgaacttggcccttccgctgccgcacccaaagccacgtacctgggcaagccggtactggtggtgaaagaagcggacacctggctggcgattgtcggtattccgttgacggtcaagcctggcaatgagcgcatcagcagcggcggacgcaacctgccgtttatcgtcggctacaaaaagtacccggaacaacgcatcaccctgaaaaacaaaagccaggtaaaccctgacccggcgcagctcaaacgcatcgaaggcgaattggcggtgcagctcaaggcctaccgcagtttcagccctaacctgccgagcaacctggtgctggacaaaccggtgaacgggccgctgtcgagcaagttcggtgtgcggcgcttcttcaacggtgaagaacgcaatcctcattcgggcctggactttgcggtgccggccggtacgccgatcaagacgccagccaacggcaaggtgatcctggtgggcaactacttcttcaacggcaacacggtgttcgtcgaccacggccagggctttatcagcatgttctgccacatgtcgaaaatcgatgtaaaagtgggcgatcaactcacgcgcggcgcggtggtgggcaaggtcggttcgactggccgtgcgaccgggccacatatgcattggaatatcagcctgaatgatgcgcgcgttgatccagcgatctttatcggcgcatttcaaccctgaaccccgggcatcggccggcaccattcggtgccgtcgccggagcttttcttaccgatgcaacaggaaccaaaccatgctgaacacccacccattcgacgacttacaaggagcgtaaacgacactcaacctaccctgtgagacactccctatgtttgctaccgcgcaagcccttatgtcagttgcttctcggcagaccaccacgctacgtcagaccactccgcccgcaaccgacaaccgcccacctacttccagctctcccactgcccacctgaccttcgcgccagacttcccccccctccccagctcatcaggcatccccccagccacacctagcccacttgcaaagcactttaacgtcagtgaccagcaggcctttctggatcaacacgacagcctcaccctcgagatgcaacgcctacacaatcagcaacccaccttcaaggcattcctgcaaagcgaactggaaaaagcgtttccagacgtcaggccgctcaacgccgaaacgctctcgttcaaccgttaccgcagagacggcgatcacgaaacactggcctcttccgagcccttgatgaccgccctcgcccgaatgatgcaagagatccaggccaatccgaatcggctgagatcggctgagcgcaacatccgcacggagttcattacccaacaaactgccaatgacagtgccacgccagccattacctcaggctccttgcaatccatcgccagagcgatcgtcacgcagtaccccgcaacgctgcaggcattctggacgacacctcgcccaggcacgacacccccgcagacgccccaggaccacctgctggccttgcacaaacaacaactatcgaccctcgccgcactgcgcgcagcagacggcacgctaagcccggccagcaagacgctgatcgacaacgcactgcaataccccaccctggccgagcgggaaaaagccttcgccgatggcgcgcgcccaggtgtgtatccgctcactctcgacgacggcaccgagcgcggcgcactgctggcgggcacctttctgatcacacagaccgatgggtcctttgcctcaccacccacctggcccaaaggaaaatccttggcgctcaacgacgcccatggcccggtcgtgctgtacaccccaggcgacggtttcgaggagtttgccacgccggcccaggcgcgccaggccttggcaaaacggcttgacgagggaggcgtcaacgccgacctgctgctgcaaaccctgcccctatcgttgcaaaaccgccccgaaccgcccaacggggaagacctgatgctcagcgtcgcaccgctggatggcgatgtactggccgaaggcgtcccctggatgctcaagcgccagcaggcagaagtcgaagcgaaccagctcaaagccccgctgtcagccacggccatcgatgacgctgccgactggtcgtatctgctcgaaggcaccaatgccttgcaggcacgtaatcaagcattggcggataagctgcaacccgagtggctgaaaaacctgagccccgcccaagaagccctcttcgcccatctggagcaagcgcaagaaaaaagcgccgatgcgctggtgccgctgcttgaaactattccggccctgcccactttcgctcgtgatcggatgaacgaagcgattaaaaagcagtacccgaatgccgaggtgaatgccgatcaactgatggttcaggtccgcaccaggactcacgtcaacaacggtcgaaaaaccagcagccatacgcctttcgaaaaaaacaaacaggtatcgctcaccgacctggccctgaaaaaccccaccgagttccccgccggtgaaacggccacgttcacccaaaccaccttcaaactgcctctgagcgacaaacagggcaaaccggtgctcgacgccgatggcaagcctgttgtactggacaccgaccaactcaagcccctggtcaacgccgccgatgtcgggggtgaatacaccgctctgctgaaaaaagaactggccacagacgccgtggcgggcctggcaggacagcggcgtgacgcatggaaagccagccaggctgacctgatggccaaagaggcatttctcgcagaactcaaccccgatgcctataaagccgaagccaaggaggacaagaccagcaagcgcggggcgcaatgggtcgcggccgtactggatcaccccgacccggccaaccgcccgcaagtcgatggcgaaaccatcgagacccacgccctcgtccaacgtggcctgccggttcaaggcgtgatggtgatcggcaacagtaaagatgcggagcgggtgctatacacgccgaatgcacccgacggcatcacgtttcgcgaagtcgccagccaacaggcactcaacaccctgctggaaaaaaacgagtggaagctgtacaccgcgaaccgcaagtcgccggtcagcaaagatgacgtcgcccaagcgaaacagaccctcgacaaacacaagttagatatggcgaggaaccccgccgcagccatcgagaccttcgtcaaagccctcaaactgacaggcgacacatccaccctcacccccatgaccggcaacagcctggatgcgctgtacaagcaacatgtccaattgctgaccgacagggccgaccaccaatccgtcagtagcgctgaagtggcaacgcagtcaagggccaacaaagcgcaattcggtgtggatgtggcgctgatcttcctcgatctgttgcccgtcgtgggcaaaggcgcctcgatgggcgtacttctgggtaaagccggggtgacggcgctgcgtgccaacgccagagtcttgcccaaactgatcaggaacccggcacttggccgggcaatttatgctgactttgccacggcaggggcaggtatgcccgtggttcggacctcgccgctgcgcccggttgccaaggcgcccttgcgcgccattgagcccgcaccgcgcccaacacccagggcgctaccggcgcccgacggcccgccaccggccacgccatcgaccagtagaggtattgtcgcccgaatcgaacagcccaccatcacgaatgtaaaccgtgacctgagcgcctatgccgtgccgaatgacgtgatacagggcgccgtattaggcccaggcagtacttatagggtgggcgacgacttttacgtgcgcttcacggacggcacgggagagcaaagggtttaccagatagagtcgaactttcatgcccgggatggacaggtcactgtcgtcaatccccatttgccgcccacgacaaacaggtcaaacagggccgtggcgtttctagtgtccacaggaaatggcgagtggcaaatcaacaatctggtcggggccgggcgtcatcggggcagacatttgccacccgaagacgtcacctacatggaccggatactctccggcagagcagcctatgatattgatgggagcgcagttactaccgggcaagtcagacgctggttccggcgcgatatgaatagtttctacgacgccctggcaacaggcggcatgccgacacgacctacgctacccgtgatggcgatcaacagtacaccggattcggccatacaaaacagcctgacccaaaacggtgtacgggggcttgtgctgggtgaaatgcatgatgagcctgcggcgtatcagttggtcattgatcagatgcagaacttcaaaaataacggcgtcaccactctgtacgttgagggcgcgccattcctgcagggttctcccaacatttccgacgcagcgctgcgcacctccgatgcggcctactttggccagcatccttacaacttggactacaagagcggccctacgcttacggatatcatcaaagaagcagacaaacatgggataaaagtcgtcgggctagagcaccagcaattgacatggcgtaccgacgatcccatgcatatgtacaaacatgcgctgggccagcagaaccgtcttagagaattcaactatcatgctgcaaaaatcatcgaacgcaccccgcccggcgaaaagttcgtggccatcgtcgggaaatttcatatgaataccgaactgggcgtcccaggcatcgctgaattgaccaacggtatcggcctgtctgtaacgccttcgctaaaaggcagctcaagcctggtcagccagccaccgcacacaccgccaccgtcactgaagttgcagcgcggtaccaacgtccctgagccatacggcgatattcatgtcgattacaacgtggatgcgttgacgaactagacacgccctataaacctcggtcacgccgcctcaacgcggcgtgattattaattgcgcaccagcaaaaacaagcagcaatcaatcactaacaattctcaaaaaacaaatcattaatttcgaaaaatcatcaaaaaacgaaaattatctcaatttttttttgcaacttgccatcccattcgctggcggttagggttgagcccatgaaaacctctcacaccctcattcagctccgccagcaccgcagcctgtgcctcgtcagcgcacgactgccaggctgaatcgatctgcctcgtctttacgttttatccccaaaaacagttccacggcaggccgccttttctcggcccctacaacaaaggatttcccgatgagcatgctcaaagacccgtcttcgaagtaccgcgcgtttccgaccatcgatatcccgaaccgcacctggccatcgaagaccatcaccgaagcgccgatctggtgcagctccgacctgcgtgatggcaaccagtcgctgatcgagccgatggacgcggtgaaaaagctgcgcttctggaagaccctggtcgccgtcggcgtgaaggaaatcgaagcttcgttcccggccgcctcgcaaaccgacttcgacttcgtgcgcaccctgatcgaagacggccacatccccgaggacaccaccatccaggtgctgacccagggccgtgaagacttgatcgcacgcaccttcgaatccctgcgcggcgccaagaaagccatcgtgcacctgtacaacgccacgtcgccgtccttccgccgcatcgtgttcaaccaggacaaggaaggcatcaaggccatcgcggtcaacgctgccaagttgttcgtcaaatacgccgcccagcagccggaaacccagtggaccttcgaatactccccggagaccttcagcgctactgagctggagtttgccaaggaggtgtgtgacgcggtgatcgaggtgtggaacccgacgcccgagcacaagatgatcctcaacctgccggccaccgtggaatgcgccacgccgaacatctatgccgaccagatcgaatggttcggtcgccatatcaatcgccgtgacagcgtgatcatcagcctgcacacccacaacgaccgtggcaccggcgtggccgccaccgagctgggcctgatggccggcgccgaccgcgtcgaaggctgcctgttcggcaacggcgagcgcaccggcaacgtcgacctggtcaccgtggcactgaacatgtacacccagggcctcgacccacagctggatttctccgacatcgatggcgtgcgcaaagtcgtcgaagagtgcaaccagatccaggttcacccgcgtcacccgtacgtgggtgacctggtgcacaccgcgttctccggttcgcaccaggatgcaatccgcaagggtttcgcccagcagaaagacgatgcgctgtgggaagtgccgtacttgccgatcgacccggccgatattggtcgcagctacgaggcggtgattcgcgtgaacagccagtcgggcaaaggcggcatcgcctacctgctggagcaggaatacgacatcagcttgccacgtcgcatgcagatcgagttcagccaggtggtacaggccgaaaccgaccgcgtcggcctggagatgactgcaccgcagatctatgccttgctgcagcgtgaatacctgcaagccaacaccccgtacgcgttggtcagccatcgcctgcaggaagagaacggcaacagctttgtcgaggtggaagtcgcgggcaagggccagggcgaaaccaacctgcactggaaaggcaaaggcaacggcgccctggaagcgttggtggccggcttgccgattggcgtggagatcatggactacaacgaacatgcgatcggtgcgggcaccaacgccaaggcggcggcctacatcgaactgcgtgtgaacggcgagcgaccggtgcatggtgtggggattgatgaaaacatcaccacagcgagcttcaaggcgctgttcagtgcgctgaaccgttcgttgagccagcaggaagcaaaagcagcgtaagcagtctgcttaaaatgtgaaaggcccctggatatgagtcctggggccttttttttggttttttgtggtctgtgagggcctcatcgggggcaagccccctcccacattttgaatgtattcacaaattaaagtgtgggagggggcttgcccccgatagcggtctgtcagacaaactggaaagtatcggcatccaggttggctggaaacctggtgcgatacgcggccaattccgccgcatccaggctcacctggaacactccatccgcctcccccgcactcagcagcgtctcgccctggaagtccaacacctggctatccccggtgtaggcaaagcccttcccatccgtgcccacccgatttaccgccgccacataacacaggttctcgatggcccgcgccggcagcagtcggttccagtgcgagcgccgcgcccccggccagttggcggtgtacagcagcaggtcggtgtcctgggcatcacggctccacaccgggaaacgcaggtcgtagcaaatcaacgggcgaatacgccaacctttcacttcgaactgcacctggcgctcaccgggggtgtagtggttgtgctcgccggccatgcggaacaggtggcgcttgtcgtaatgcaacacctcgccatccggccgtgcccacagcaggcggttgcggtggctgccgtcggcagcctggatgatcacgctaccggtgatgacggcgttgtacttcgcggcctgtgcctgtagccaacggtgggtcgggccgttctcgggttcggccagggttgctgactccatggaaaaaccggtggtgaacatctccggcaacacgatcagatcagcgcctttcgcctgctccaacaataacccgaagtgctcaaggttggcttggcggtcgtgccaggccaggctggtctggaccagggcgatgttcaggttcggcagagcactcagatcgcgcatagtttttcagccgcttgttgcagcgtttcctcacgtttggcaaagcaaaggcgcaccaggcgctggccttggggtggggtctggtagaacaccgagaccggaatcgtcgccacgccgtgttcgcgggtcatccatagcgacatggcgacgtcatccaggtccgggcggatctgtgagtaatccaccagttggaagtaggtgccggtcactggggtaaagctgaagcgcgatggcgccagcaggtcgcagaacagatcgcgcttggcctgatagaacgccggcaactcatcgacatgctccgggtgctcagccatgaaatcggccagcgcgtactgcaatggggttacgccacagaaattgacgtattgatgcaccttgcgcagttcgccggtgagggccggcggggcgacgacgtagccggttttccagccggtgacgtggtaggtcttgccgaaagagctgaccacgaaggcgcgctggtagagttcttcgtgggccaacacgctgacatgggccacgccgtcgaacaccaggtgttcgtagacctcatcgctgaccaggtagatgtcacgctcgcgaatcagttcggccaactggtccagttcggcgcggctgatcagcgcgccagtcgggttatgtggggagttgaggatgatcatgcgcgtacgcggtgacagggccgccttgatcttctcgaagtccagcgcaaagccatccaggcgcagttgcacatgcacgcagcgaccacccgccagctccaccgacggctcgtagctgtcgtagctggggtcgaacacgatgacttcatcaccgttgcgaatcaccgcctggatcgcgcagaagatcgcctcggtggcgcctggagtgatggtcacttcagtgtcggcattgactgtggcgccatagctgcgggcgatcttggcggccacctgctggcgcagcaccggtaagccggtcatgggcgcgtattggttatgcccgagggcgatatgcttgcccactgcgtcgagcaaaccctgggggccattgaagtccgggaagccctgggacaggttcagcgccccggtctcggcagcgagttgcgacatggtggtaaaaatggtcgtgccgacattcggcagcttgctggtgatcatgggagcccccttcggctgagctgcaagttttaagctgcaagccataagcaggtcaaggggcaaaccgccaggcacaaaaaagggctccaaaggagccctctcttgcagctaacaacttgaagctacgattacttcttatcgcggcgcttcttgtcggccttcttatggtgagtcatcaaacgacgcttcttgttcacctgacggtcagtcagtgtgttcttgttgccttcgtatgggttctcaccacccttgaactcgatacggatcggcgtaccgaccagtttcaagacacgccggtaggtgttttccaggtaacgcacgtaggacttgggcaccttctcgatctggttaccgtggatcacgataatcggtgggttggcaccgcccaagtgggcgtaacgcagtttgatccggcggttgttgaccatcggcggcgcgtgctcgccaaccgcgtcttccaagatctgggtgagacggttggtcggccagcgggtgaccgcggacttgaacgagttctgtacggaagcgtagaggttgcccacgccggtgccgtgcagtgccgagataaagtggatatcggcaaactcgacgaagaacaggcggcgttgcagctcgatcttgacgaaatcgcgctcgctcggcgtcatgccgtcccacttgttgatcgcgatcaccagcgcacgtccggcctccagggcaaagcccagcaggttgaggtcgtggtccaccacgccttcgcgggcgtccatcacgaagatcaccacgttggcgtctttgatcgcctgcaaggttttcaccaccgagaacttttcaacttcctcgtggatcttgccgcgcttgcgcacaccggcggtgtcgatcagcgtgtacttttcctcgttacgttcgaacgggatgtagatgctgtcgcgggtggtgccgggctggtcatagacgatgactcggtcttcaccgagcatgcggttgaccagggtcgacttgccgacgttaggacgaccgatgatagcgatcttgataccgtctttttcgctcgggccaggaatgcgcttggcttcctcaccttcggcgacgatttcctcttcgccctcttcttcctcgacgtcatccttggggaaatcgcgcagggcaatttccagcatctgggtgataccgcgaccgtgcgccccggcgaccgggatcgcatcgcccaggcccatcgggctgaattcggctcgggcagcttcaggatcgatgttgtcgatcttgttcgcgaccagataggaacgcttgttgcgcttgcgcaggtgctcgccaatcatctggtcggcagcggtgtagcccgcacgggcgtccaccaggaacaacacgacatcggcttcttcaatggccagcaacgactgctcggccatcttttcgtccatgccatgctcgtcaccggagataccaccggtgtcgacgataatgtaggagcgcccttgccactttgcctcaccgtattggcgatcacgggtcagaccggacaagtcgccgacgatagcgtcgcgagtcctggtcaggcggttgaacaaggtggacttgccgacgttaggtcggcccaccagggcgattacgggaaccatgcggctctccacttcgttatttcagaaaatacaaaagccgctgcaaggcagcggctggtgctcggggcagcataatcaaatgccgcatgccccgccgaagcggggccgcctgggtgttaccccaagcatagttcttacttgatggtcagggcttccagcttgccgctgttgccaaacacataaagcatgttacccaccaccagcggacgcgcacgcaggccgtcgctgtcgatacgctcgcgaccgacgaaacgaccatccacctggctcagcaggtgcaggtagccttcgaagtcaccgaccgccacatagctggagaagacttccggtgccgacaactggcggcgcgccagggagtcgttgctccacagtgccgtggtggaacgctcgtcgacactttcgacagtgccggacgccaggctgacatagacgctgccaaacccttgggcgacaccggcgtagctggaagcatcacgctgccagttgacgcggccgctctgcaggtccagtgccgcaacacggccctggtaagtggcgacgtagatggtttcacccgacaacagcaagccaccgtcaatgtccactacgcggtccagctcggaacgaccttgcgggatggccacacgggtttcccaggccggcacgccgttctgggtatccaaggcgaccactttaccggtcgacaggcctgcaacggccagattgttggtcacaatcggaccactggtaccgcgcagcgtcagcaccgcaggcgtgctgtcgtacaaccaacgctgtgcgccggtgctggcgtcgaggccgatcacacggtcgtcctgggtttgcaccacgacgatatcgccgttggtggcaggcggtgcgagcacttcactggtcacgcgagcgcgccatttctcttcgccggtgctggaatccaacgccacgacttcgcccttgagcgtgccgagcaagaccatgccgtaacccacgcctactgcgccggataccggaatttcgaggtctttcttccacttcacgtcgccgttcatgcgatccatggagatcactacgccggtcacgtcagcagcgacaatgttgtcaccgtcgatagccggtaccagcatgttgtaggtttcgccctggccgtcaccgatggagcggctccactgcttttgcaggaccacttcttccttgaagctggtcagctccgcaggcggcagttctttcttactgttgctgctgcaacccgcggccagaacggccagagccagcaatgctgcatgtttccaacggatcacgtcacgcatcccctttggccaagtcgtccagcttgatttgtaagccaccgaccgccgcttcatcagacagcgccgccttggctttcttgtacgcagcattggcttcgtcggtacgacccaattggaccaacaggtcgcccttgagctcttcgcgagtggctacaaatgccttgtcagcatcgccgtcgagcagtttgagtgcttcgtcagccttgttctgtgccgccagtacctgcgccaggcgctgacgtgcgatttcacccagggtcgggttggtcggcttgtcggcgatggccttcagctcagcggcagcgtcgtccagcttgccggtgtcgaccgcgactttcgcgacgaacaggctgccgtattgggcgtaggtgctaccgccgaattcgttcttcagcttgccggccaggtctgcaacctgcgcagggtcgggcttgccgtccggcgtcagggtggtttccaacaattgctgatagaggatcgaggcgccttgggactggttggcctgatacttggtccaggcttgccagccgaagacaaccactaaagccagcagaccgccagtaaccagaggcttgccgttgcgctgccaccagtccttgaactcggccagttgctcatcatcagtactcgacaccccaatactccttaatcgctaaattcggctgttcgacagcttcaaccctgcacgacgcaggtggccaagtgcgcagcgagcgcatcaaaggcaatgttctgttgctcaccctggccacgcaggggtttgaaacctatcacttgctgggccagttcgtcttcgccgaggatcagtgcatacaacgcaccgctcttgtcggccttcttgaactggctcttgaagctgccggcgcccgcattgacttgcaggcgcagattgggcagttggtcgcgaaccttttcgctcagggccagggctgccagttcggcggcctcgccaaaggcgcacaggtacacgtccacctgacgggagatctcttccgggacctgctcaagggtttccagcagcaggatcagccgctcgatgcccatggcgaagcccacaccggtggtcggcttgccgcccatctgctctaccaggccgtcgtagcggccaccagcacacacggtgccctgggcgccgagtttgtcggtgacccactcgaatacggtcttgctgtaataatcgaggccgcgcaccagcttggtgttgatcacgaacgggataccggccgcatccagccgagccttgaggccctcgaagtggatacgagactcgtcgtccaggtagtcggccattttcggcgcattgaccagcacggcctgggtatcggcgttcttggtatcgaggacgcgcaatgggttggtcttcagacggcgctggctgtcttcgtccaacttgtccaggtgggcggacaggtactcgaccagggccactttgtagcggccgcgggattcactggtgcccaggctgttgagttcaagcttgaccgcgtcgcggatacccagcaggccccacaggcgccaggtcagcacgatcagctcggcgtcgatatccggaccgtcaaggttgaacacctccaggccgatctggtgaaactggcgatagcggcctttttgcgggcgctcgtgacggaacatcgggccgatgtaccacagcttctgtggctggccaccaccggtgaggccatgttcgagcacagcgcgcacgcacgcggcagtaccttccggacgcagggtcagggagtcgccgttacggtcttcaaaggtgtacatctctttttcgacgatgtcggtcacttcaccgatggagcgcttgaacagctcggtgaactcaacgatcggcatgcggatctgcttgtaaccgtagttatccagcaggcgcgcaacagtgctctcgaagtagcgccacagcggcgtctgctccgggaggatgtcgttcatgccacgaatggcttgcagagacttgctcacatcaaatccttaaattcgttcttagccgcgcgcgatcagcgctgcgtcagccgcgaccttttcggccgctttctcgcggatcagtctttcgagatgatccaccagattgtcattcgtcaacttctgcgacggtttgccgtcgatgtagatcaggttcggtgtaccgccggtcaaaccgatgtgcgcctctttggcttctcccggcccgttgaccacacaaccaattaccgcgacatccagcggcaccagcaggtcttcgaggcgcccttccagctcgttcatggttttcaccacgtcgaagttctgccgcgagcagctcggacaggcaatgaaattgatgcctcgggaacgcaaatgcagggatttgaggatgtcgtaaccgaccttcacttcctctaccgggtctgccgccagggagatgcggatagtatcgccaatcccttcggcgagcagcataccgagacccaccgcagatttcactgtgcctgaacgtaaaccgcctgcttcagtgatacccaggtgcaacggctgtacgatttccttggccagcaggcggtaggcttctaccgccatgaacacgtcggaggcctttacgctgaccttgaagtcctggaaattcaggcgttcaaggtgctcaacgtggcgcagcgccgattcgaccagcgccgccggggtcggctcgccgtatttcttttgcaggtctttttccagggagccggcgttgacgccgatacggatcggaataccacggtcgcgagcagcatccaccacggcacgcacacggtcttcgcgaccaatgttgcccgggttgatacgcaggcagtccacacccagctcggcgacgcgcaatgcgatcttgtagtcgaagtgaatgtcggcaaccaacggcaccttgaccagttgcttgatgcgaccaaaggcctcggcagcgtccatgtccggtacggagacgcgcacgatgtccacgccagcggcttccagacggttgatctgggcaacggtggcggccacgtcattggtgtcgctgttggtcatgctctgtacggcgatgggggcatcgccacccaccggcaccgagccgacccagattttgcgcgatacgcgacgtttgattggagattcgccgtgcatgactattgtcccaacttcaggcgagcggtctcgccggtggtgaacggcgctacgtctacaggctggccgttgtaggccacttgcgcgccacgggcaaagcccagacgcagcgtcaaaggaggcttgccgccttggtcgagcgtatctcccttacgcttgagaccgctaaacagcactttgccattgccgtcggtgacttgcgtccagcagtcggcgacgaaggtaatctgtacgcggccatcaccggcgatcaacgctggggtggtaggtggcgaaatcgcaggagctgccggagcggttggcgctggagtcgctggcgcctgcactggagcggccggtgtatgggctatggcccccgaagcagccggcgtcgcgggaaccgttgcggcagcggtcgcggcaggcgcggtttccggtgctggcagctcagtagcggcggatgcttcaggcgcggcctggccttgggcgacagcctggtcttccggctcgtccagcggatgaatctgggtagtgccgtcggcgctttcgacttcgacgtgctccatggcgttgctggtcaggtccttggtgcgctgggaggtctggtcttgccaccagacaaaaccgccaccaatgacagcgatcagcagcaacaggctgacaattcgcaaaatcgtgtgggaaacccgcaccggttcttcgatgcgacccaagccatgcacattgctaccttgggagtcggtgccggtaaactggtcgaactcctggactagaacagtctggtcgatccccagcagcttggcataggcacggatatagccgcgggcgaaggtatgcccaggcaacttatcgaacgcgccagcttccaggttgcccagggatgtactggtcaaattgagcttgagggccacttccgccagcgaccaaccattgctttcgcgggcctgacgcaaggtgtcgcctgggtttacgcgattagctgctacaacttccgggtgcgccgctttcatcattgctccgacaggtattgctgatattccggcgtaccgggatagagtcgttcgagttgctggccaaaacgtgcagccgtgtcgcgttcttcatgaaccgtcgccagccgcacaccgagcaatagactacgtgcattttgcccgctgagcaggctaaaacgctcgtaatagtcacgtgccggcacataatgcctgtcatcaaaggatatctcagccatttcgagcaatgcccgaggctggcgaccattcaagtgcagggctttttccagttgccggcgggcattgtcgcgctggccgaggcggatcgaggtgaccccgaggttctcgaacacccgcgaacgctcaggatagagggtatcggcgctggcctgctggaaataaagagcggcctggtcataacgcttctgcgcaaacaggaaactgccgtagttgttcagcagccgcgggtcggcagggcgtgcggccagggccttgtggaaataccggtccgccagttcaggctcggcctgggcctggaacaccagggccagtgcggcattggcgtcggcatcgtcgctgtccagctcaagcgccttcttcaacggcaccttggcctgctcgttcatcccttgctgaaggtaacccaagcccagttgcacataggcaactcgcgcctcatcacggcctttaccggtttgcatagggctgtcatggcccgatgaaacacaaccagccgacaggccggtaacaagcagaagcagcgcaaggcgcaagggcatagagatcctctctcagattcgattcacagcgatcagcggtaaatcgtcggcggcgttcacttcacgtccggcgatataacgctcgctgcggcgggtgcggtccatcacctgcccgaccaattggccacaggcggcgtcaatgtcttcaccacgggtggtgcggacggtgacgttgtagccagcctggtgcagttgatcctggaaacggcggatggcgttgttgctcggtcgctcgtagccagaatgtggaaacgggttaaacggaatcaggttgatcttgcacggggtgttcttgagcaactcgatcatctcgaccgcgtgctcgaccttgtcattgatgtctttgagcaaggtgtactcgatggtcagcacgcgcttttcacccagggacgacatgtagcgctggcaagattcgagcagcatcttaagcggatacttcttgttgattggcaccaattggttacgcaatgcgtcattgggtgcgtgcagcgacaacgccagggagacgtcgatgtgcttggacagctcatcgatcatcggcaccacgccggaggtggacagggtcacacggcgcttggagatgccgtagcccaggtcgtccatcatcaggtgcatggccgaaaccacattgtcgaagttcagcagcggctcacccatgcccatcatcaccacgttggtgatggcacggtcgacggtcgccgggacgctgccaaaggatttgttggcaatccacacctggccgattacttcggcggcggtgaggttgctgttgaagccttgcttgccggtggagcagaaactgcagtccagggcacagcctgcctgggacgaaacgcacaaggtgccgcgtttgccctggggaatgtacacagtctcgacacagctgccggacgccacgcgcaccacccacttacgggtgccatcgctggagatgtcctcgctgaccacttcgggaccacgtacttcagcaatggccttgagcttgtcgcgcagggccttgctgacgttcgtcatggcgtcgaaatcatcgacgccaaagtggtgaatccatttcattacctgaccggcacggaaacgcttctccccgattgagtcgaagaatttctccatttccggctgggtcagccccagcaggttggtttttacagtcgatgtcgtcatggattcaccctcactctttaagccgatgcttagcgagcggttacttcagtagcggcgaagaagtacgagatttcgcgagcagcagcagcttcggagtccgaaccgtgtacagcgttggcgtcgatggactcggcgaagtcagcacggatggtgccggcagcggcttctttagggttggtagcgcccatcagctcacggttcagagcgatagcgttttcgccttccagaacctggacaacaacaggaccggagatcatgaaggcaaccaggtcgccgaagaagccacgagcgctgtgctcagcgtagaagccttcagcttcagccttggacagttgcttgagtttcgaagctacaaccttcaggccggctttttcgaaacgagtggtgatctcgccgatgacgttttttgcaacagcgtcaggcttgatgatggagaaagtacgttgaacagccatggtgtaactccagaaacggtaatttacgaaaaattaaacccgcgaattatacgcgggttattgggtattgcctaactgcgtaagggaggcgtcagtcctgttcttctttccaggcagtctggatagcctccaggaccttttcaccaccgcgatcacgctcatcttcgaaccctggcaacgccatgaccatgtcacgcaaagctacaaagttcagggagtaaggatccagatccgggttggcatctgccaacaggatagcgatctcttgcacatcaacccatttaagactcatgacacttccttgaatcaatgcggcgcttcggcagcatggttgagggaatacttcggaatttcgacagtgatgtcttccgtgccgacctttgcctgacagcttaggcgagaagtcgcttccaggccccaggcacgatcaagaaagtcctcttccagctcgtctgcttcttccagagtgttgaaaccctcgcggatgatgcaatgacaggtggtgcaggcgcagacaccgccgcaggcactttcgatctcgatgtggttgtcatgggcaacttcgaggatggacttgccggtctcagcctccacgaccataccgtccgggcaatgctcggcgtgtggcagaaaaatgacctgcggcattaattattcctcgatttcattcaggttgcgcccggccagtgcggctttcaccgtctgatccatgcggcgggcggcaaaggcatccgtcacttgcgacaggcgcttggtctgttgctcgatggcataaccgtcgttgcctttcatcagttcggccagttcctgcatctgcaggtcgatgaccatgcgctcttcggcatccagcaggcgctcgccgtcggcatccagcgcgccctgcaccgcttcgagcaggcgctgggcgtcgacttgctgctcacgcaatacacgggcgaccttgtcgtcaccggcatattggaacgagtccttgagcatcttggcgatttcaccgtcggtgaggccgtaggacggcttgacctggatgctggcttccacacccgaacccaactcgcgcgcggcgacgttgagcaggccatcggcgtcgacctgaaaggtcacgcgaatctttgctgcgcccgcgaccatggccgggataccgcgcaattcaaagcgcgccagggagcggcagtcgctgatcagctcgcgttcaccttgcagcacatggatcatcatggccgtctggccatctttgtaagtggtgaagtcctgggcgcgggcgacggggatggtggtgttgcgtggaatcaccttctccatcaggccccccatggtttccaggcccagggacagcgggataacgtcgagcagcagcaattcgccaccatcacgcttgttgccggccagggtatcagcctggatcgcggcgccgatggcgaccacctgatccgggtcgatttcagtcagcggctggcggccaaaagcttcggcgacggcttcacgcacgcgtggtacgcgggtggacccaccgaccatgaccacggcaccgacttcttccagctcgataccggaatcgcgcaccgcgcggcggcaggctttcaggctgcgggcaaccattggctcgatcaacgcatcgaaagcttcgcgggtcagttgggccgaccaggtgccgtaggaaacttcaacgcttgcagcattggtcagcgcttctttggccgcgcaggcggtttgcagcaggttgcgctgcgcgcccgggtccagatcggcagacaagccggcgctggtgatgatccagcccgcaatggcgtggtcgaagtcatcgccgcccagggcgctgtcgccgccggtggcgagcacttcgaagacgccgccggtcaggcgcaggatcgaaatatcaaaggtaccgccgcccaagtcgtaaatagcgacgaggccttctgcatgctggtccaggccataggccacggccgctgcggtcggctcgttgagcaggcgcaatacgttcagaccggcgagtttcgccgcgtccttggtggcctgacgctgagcgtcatcgaaataagccggaacggtgattacggcaccgaccagttcgccgcccagggttttctccgcgcgctggcgcagcaccttgaggatatcggccgacacttccaccgggcttttcgggccttggacagtgtcgatgaacggcatatgggattcgccgccaacaaagcggtacggcagctggtcgcccaattgcttgacgtcggacagaccacgacccatcaagcgcttgaccgacagtacggtattcaaagggtcggaagacgccgccagcttggccaactcaccgacttcgatgcggtcggcgtggtagcgaacggcagacggcagaatcacctggccatcagcgtccggcagcggctcggacaagccgctgcgcaaggcagcaaccagggaattggtggtgcccaggtcaatcccgaccgccaggcgacgctggtgcggttgagggctttggccgggttcggcgatttgcagtagggccatggtaatcaggtcttatctgtctatcaggcgtgcatcacgggcagcacactgggttaatcgtcgaggcgctcttctagctggcgcacttcgtaggtgagcttgtcgaggaactgcatgcgccgcatcaggcgttcggcctgctcacgttgcgctgcatcatcccaacaggctgcgaagctttcgttgagctcatcctgggcggttttcagacgacgcttgaagactgcaacaccagccagatcggcctcgtcctgcaagtcttcgagttcttcgcgccactgcatctgctgcatcaggaagtccggatcatgcacggtcacttccagcggcaactcgccaccgttcatcgcgagcaggtagcgcgcgcgtttcggggggcttctgagcgtctgataggcttcgttgaggctggccgattgctccagcgccagacgttgctcacgctcggaagcgtcagcgaagcggtccggatgcacgccacgcgccaattctcggtagcgcgtggcaagttgctcaaggtccagccgaaagctcggctgcagctcgaataaagcgaaatgacaaggagtacccacgaatagcctcagatgttgaagctttcgccgcagccacattcaccgcgtacgttggggttgttgaacttgaagccttcgttcaacccttccttgacgaaatcgagctcggtgccgtccaggtaggtcaggcttttagggtcgataatcactttttcgccgtgactttcgaacacctggtcttccgcaaccacctcgtcgacaaactccagcacgtaggcaaggccggaacagcccgtggtgcgaacacccagacgaatcccctcacctttaccgcgcccattcagggagcggcgaatgtgctgcgcagccgcttctgtcatgctgatagccatcattgactccttactcgtcgccaaatgcttagatcaagcctttcttctgcttgtagtcgcgaacggccgccttgatggcgtcttctgcgagtaccgagcagtggattttcacgggcggcagggccagttcttcggccagctgggtgttgctgatggtgacagcctcatccagggtcttgcctttcatccattcggtcgccagcgaactggaagcgatggccgaaccgcagccgtaggtcttgaacttggcgtcttcgataacgccagcgtcgttgaccttgatctgcaggcgcatcacatcgccgcacgccggagcgccgaccatgccggtgccgacatcagggtcttccgcgtccatcttgccgacgttgcgcgggttttcgtagtggtcgatgaccttttcgctgtaagccatggtactgaatcctcactcatcagggccgctctggaaccctgtagaaacgcctgcgttttccgccacgttcctacagagctggggtggcggcttctatagttagtgtgccgcccactcgatcttggaaatatcgacaccgtctttgtacatgtcccacagcggcgacaggacgcgcagcttgttgacggcttcgcagactttctgcgcggcgtagtcgacttgctcttcggtggtgaaacggccgaacgtaaagcggatcgagctgtgtgccagttcgtcgttgcggcccagtgcgcgcagtacgtacgaaggctcaagggacgccgaggtgcaggccgaaccggacgaaaccgccaggtccttgagcgccatgatcagcgactcgccttcgacatagttgaagctcaaattcaggttgtgcggtacacgggcggtcatgctgccgttgatgtacagctcttcaaggccttcgacctgcttgtagaagcggtcgctcagcgctttgatgcgcacgttttcggcagccatgtcttccttggccacgcggaaggcttcgcccatgccgacgatctggtgggtcgccaaggtacccgaacgcatgccgcgctcgtgaccgccgccgtgcatggtggcttcgatgcgcacacgtggcttgcggctcacgtacagggcgccaatgcctttagggccataggttttgtgggccgagaacgacatcaggtcgactttcagcttcgacaggtcgatgtcgaccttgccggtggactgggcagcgtcgacgtgcagcaggatgcccttggaacgggtcagctcgccgatggccgcgatgtcgttgatggtgccgatttcgttgttcacgtggatcacggaaaccaggatggtgtcttcacgcagcgcggcttcgatcatggccggggtgacgataccgtcggtggtcggctcgaggtaggtaacctcgaaaccttcacgctccagttggcgcatggtgtcgaggacagccttgtgctcaatcttggtggtgatcaggtgcttgcccttggtcgcgtagaaatgcgccgcacccttgatagccaggttgtcggactcggtggcaccggaggtccagacgatttcacgcggatctgcgccaaccaggtctgccacctggcgacgagcgttctcgaccgcttcctcggctttccagccgaatacgtgggaacgggaggccgggttgccgaagtttccgtcaaccagcaggcattcgctcatcttttgcgcgacacgcggatcaaccggggtggtcgctgagtaatcaaggtaaatcggcaatttcatggactttctcctaaatcaggctggctggcgtgccgttagctcttcggctgtcactcgacggcggacgcttcgatcttgtccagacgcggcgccttggtgttgcaacggcgctggtcctgacgctgggctacttcttgcacctcacggcgagtcacaagatcagccaagctgataccactcaaaaactcatggatctgcaggctcaagtcacaccacaagtggtgcgtgaggcaggtgtcgccggcgtggcaatcacccagcccctggcatttggtggcgtcgacggattcgttgaccgcgtcgatcacctgggcgacctgaatgccctgcatgtcacgggacaactgatagccaccacccggcccacgcacactggacaccaggttgctgcgacgcaatttggcgaacagttgctcgagataggacagggaaatgccttggcgctcagagatatcggccagggacaccggcccagtttgcgcgtgcaaagccaagtcgagcatggcggtcaccgcgtatcggccttttgtagtcagtctcatggacaagtaccaaggtgtttcagaatgggagcaagtatgcgattcccgagtatttaagtcaactataagacctagtactttagtcaggattacccgtaaaaagggcgcgcgaatcatagcaggatggggtggggacgaacagcgggaacagggccggatggagattgctggatcaacggaggtcaacatgtgggagggggcttgctacagatagcagtctgacagctgaagaatgcatcgactgacccactgtcatcgggggcaagccccctcccacatttgagctgcattggtcgcgaggcctcagccgaccttggtggcggcttcgtccttgatttcggcgaagtcttcttcgcgcaactcaggcagatccttggcgcaatacgggctacccagatccttcagcgcaccacacataccctccaacttgccgtccaccgcctgcagatggtcgagcaactggccgatagcgcgtgccaccgggtcgggcatatcttcgctgacaccgtaggcatcaaaaccgattttctcggccatggccttgcgcttggcctcctgctcgtcgccggcttccggcttgacgatgatccggcctggaataccgacaacggtcgcacctggaggcacagccttggtcacgacagcattggaaccgaccttggcacccgcgccgacagtgaaagggccgagcaccttggcgcccgcccccaccaccacgccatcacccagcgtggggtgccgcttgcctttgttccagctggtgccgcccagggtcacgccctgataaagggtgacgtcatcaccaatttcggcggtctcaccaatcacgatgcccatgccgtggtcgataaagaaacggcgcccgactttggcacccggatgaatctcgatcccggtcaaccagcgaccgaagttcgacaccagccgcgccagccatttccagcccatgccccacaaggtgccggacaggcgatggatccagatggcgtgcatgcccgggtagcaggtgagcacttcaaaggcattgcgcgccgccgggtcacggtggaaaacactctggatatcttctcgcaaacgctcgaacatttttaatccttccgtttaagaagctcgccacgggccgccttctgggtttccgtgaggatgccacgcaatatattcatttctgcccgactgaccgagctgcgtccgtaaaggcgacgcaggcgcgccatcaagtgccgtggtttttccggatcgaggaactcgatggccaccagggtttgctccaggtgttcatagaaccgttccagctcgtccatggtggccaactcgccacttttggtcgaggcaacctcttccttctctaccttgcttggctgaccagcagcggccagccaggccatgcgcacttcgtaagtcaacacctgcaccgctgccccgaggttcagcgagctgaattcagggtctgatgggatgtgcacgtggtaatgacatcgctgcagctcttcattggtgaggccggagtcttcgcgaccaaacaccaaggcgatttcagcgccaccggcggcctcttccaccaccttggtgccgcactcacgcggatccagcaatggccaggggatgcgacggtcgcgggcactggtgccgagcaccaggctgcagccgaccaaagcgtcttccaaggtggcgacgacctgggctttttcaagcaggtcattggcaccggatgcgcgggcatcggcctcgtgatgcgggaacacgcgtggttcgaccagcaccaggcgcgtcagccccatgtttttcatggctcgcgccaccccgccgatgttgccggggtgactggtattgaccaagacgacacgaatgttttgcagcaagggaggcgctctcggacacgggaaaggggagcaaatcttacagaacagcctaaggttatgccatgaaagctaacgtcgtccttcacctgaagaaagtttctgctagaatgctcggctttctttaacaaccttaggtgacacatccatgcagcccatgctgaatatcgcgctgcgcgccgcccgcagcgccagtgaattgatcttccgctccatcgagcgcctggataccatcaaggtcgacgaaaaagacgccaaggattacgtatccgaggtggatcgcgccgccgaacagaaaattatcgacgccctgcgcaaggcctaccctacccacggcatcctcggtgaagaaaccggcctgcacaaaggcagcggtgaaggcgaagactacctgtggatcatcgacccactggatggcaccaccaacttcctgcgcggtatcccgcactttgccgtgagcatcgcatgcaaataccgtggccgcctggaacacgccgttgttctggacccggtccgccaggaagaattcaccgccagccgtggccgtggcgcccaattgaacggtcgtcgcctgcgtgtcagcggtcgtaccagcctggacggcgccctgctgggtactggcttcccgttccgtgacgaccagatggacaacctggaaaactacctgggcatgttccgcgccttggttggccagaccgccggcatccgtcgcgctggcgcagcaagcctggacctggcctacgtggccgccggtcgttttgatgcgttctgggagtcgggcctgtccgagtgggacatggcggcaggcgccctactgatccaggaagcgggcggcttggtgagcgacttcaccggcggccacgacttccttgagaaaggccacgtggttgccggcaacaccaagtgcttcaaggcagtactgacggccatccagccgcacctgccggcttcgctgaagcgttaagcgagcgagcacaaaaaagcaccccgaggggtgctttttttatgcctgggatttgaggtttgccgcaactccagcaacaacacaaatcaattgtgggagggggcttgcccccgattgcagtgggtcagcacctaacaagctgactgatccaccgctatcgggggcaagccccctcccacattttgaactcacataattttttgcatctgtaccaggcttgagattactgctggttctggcccagcaccaagcggccttccttgtcgaccggaatctggccgcctggatcacggtccatacgcaccgagccttccttgccatccaaggtgtaacgcacgtcataaccgacaaccttgtcgctgatgtcgttgacggtgttacaacgggtttgcgtggtggtgtaggtatcgcggttctgcataccttcctgaaccttgttaccggcataaccgccaccgaccgcaccggctacggtagccagcttcttaccgttaccgccaccgacctggttacccaataggccaccggccagtgcaccgaccaccgtaccgacgatctggtgctgatcctgcacgggcttctgccgagtcacggcgacgtccttgcagacctcacgcggcgttttaatctgggttttcaccggctgcactgccagcacttgcgcatactcagggccgctttttaccaggctgtaggtggcaacagcacccccggcagtcacaccgacagcacccaataccgcaccaaccagtaacgacttgttcacatgaacctcctgaccatcacaaacggatcgaaagatccgcgctatacccagccttggagcaaaaaaaaaggcacgagttcaatactcgtgccttctttgtaacagcggatcaacaagcgcccatcaagggcggtcgtcaacctccttgccagtagccgcaggagggatcagatcttcgctgttgaggttcagccagatcagcaccacgttggcgatatagatcgacgagtaggtacccgccagcacgccgatgaacaacgccagggagaaaccccacaggttgtcgccgccgaagatcatcagcgccgcaatcgccagcaacgtggagatcgacgtcgccatggtgcgcagcagggtctgggtggtggagatgttgatgttctcgatcagcgaggccttgcgcagtacacggaagttctcgcgaacccggtcgaataccacgatggtgtcgttgagcgagtaaccaatgatcgccagcacagccgccagcacggtcaggtcgaaggtcacctggaagtacgccaggatacccacggtcacgatcacgtcgtggatcagcgacacgatcgcgccaacaccgaacttccactgaaagcggaacgccaggtagatcatgatgccgaccagcgccatcagcatgccgaggccgccctggtcgcgcagttcttcacccacttgcgggccgacgaactcgacgcgcttgaccgacgccgggttgtcgccgccgaccttctgcaaggcctcggccacctggtgacccagttgcgggtcttcgcccggcatacgcaccagcaggtcggtggtcgcaccgaagctctgcacgatggcttcgtgatagccggccttgaccagctcgttgcgcaccagggtaacgtcggcaggcttctcgtaggtcagctcgatgagcgtaccgccggtaaagtccagaccgtagttcaggcccttatggaaccagctgaacaacgccagaacggtaaggagcacggtgacgccgaacgcaatgttgcgaacgcccatgaagttgattgtacgtaacatggcagccccttaaatccacaacttcttgaagtcacgcccgccaaagatcaggttgaccattgcgcgggtcaccatgatggccgtgaacatcgaggtaaagatacccagggacatggtcaccgcaaaacctttgacggggcctgtgcccatggcaaagagaatcccgccgaccagcaaggtggtcaggttggagtcgagaatcgcagtaaatgcccggccgaagccttcgttgattgcacgctgtacggtcatgcccgccgcgatctcttcacggatccgcgagaagatcagtacgttggcgtctaccgccatacccatggtaagcacgataccagcgatacctggcagggtcagtgtagcgcccagcagcgacatcagggccagcagcatcaccatgttgcccgccagggccacggtggcgatgatgccgaagaagcggtagatggcgatgatgaacagcgacacgaacaacatgccccacaaagcagcgtcgatacccttggtgatgttgtcggcacccaggctcgggccgatggtacgttcttcagcgaagtacatcggtgcggccaggccaccggcacgcagcagcagggccagctccgaggattcgccctggccgttcaggccagtgatgcggaattgagcacccagcggcgactggatggtcgccaggctgatgatcttcttctcttccttgaaggtctggaccggtacgtccttctcgacgccgtcgaccatctgcttggtgtaagtggtgacagggcgctgctcgatgaagatcaccgccatgctgcgaccaacgttgctgcgcgtggcgcggctcatcaggtcgccaccgtggccatccaggcggatgttcacttcaggcgtaccgtgctgcgagtcaaaaccggctttggcatcggtgacctggtcaccggtgatgatcaagccacgctcgatcagtgcaggaggacgattgccttcgcggaactcgaactcctcggcagtggcgcgggtagcacccggctcggccgccagacggaattccaggttggccgtcttgcccaggatacgcttggcttcagccgtgtcctgcacgcccggcagctcaaccacgatgcggttggcgccctggcgctggacgatcggctcggctacacccagctcgttgacgcggttacgcaccgtggtcaagttctgcttgatggagtattcacggatttccgcgatcttggccggcgtcatcgccaggcgcagtacaggctgaccattgaggtcggccggtacgatgtcgaaatcgttgaagttcttgcggaccagcgcacgggcctgttcgcgggacgcttcgtcagagaaacccaactggatggcaccgttgaactgcggcaggctgcgatagcgcagcttctctttgcgcagcaggctcttcacgtcgccttcgtagactttcaggcgagcgtcgagggctttgtccatgtcgacttccagcaggaagtgcacaccaccggacaagtccaggcccagcttcatcgggtgcgcgccaatgctgcgcagccattgtggcgtggtctgtgccaggttgagcgcgactacatagtcatcacccatggccttgcgtacgacgtccttggccggcaattggtcttctgccttggtcaggcgcaacaagccgcctttggcacccgccgccaatgttgccgccttgacctggatccccgcatcagtgagcgctttgctcgcacggtccagatcggcctgattgacctgcagcgaagtgctggcgccagtgatctggatcgccgggtcatcaggataaagattgggagcggaataaataaaaccgatcgccagcaccgccaggatcagtacgtatttccacagagggtatttgttcagcatcacgccgcccgcttataacgcggggcgccttgcgcgccccgtcgattggtaaaggttgttactcagatcgctttgagcgtgccttttggcagcgtggcggcgatggcgcccttctggaacttcatttctacggtgtcggagacttccaggaccacgaaagcatcggaaaccttggtgatcttgccggcgataccgccagtagtcaccacttcgtcgcctttttgcaggctgccgagcaggtttttctgctctttggcgcgcttggcctgtggacgccagatcatcaggtagaagatgaccaggaagccgaccagaaaaatccactcgaaaccaccgcccataggaccggcagcggcaggcgcagcggcatcagccatggcgttagagataaaaaagctcatttagcactccagttgcaaatagtgaatcttagggtcggaaaactcagtccaagggcggcacagggagcccgcgcttggcatagaaggcatcgacgaaggcggccaatgtaccctgttgaatagcctcgcgcaaaccagccatcaggacttggtagtgacgcaaattgtggatggtattcaacatgctacccagcatttccccgcacttgtccagatggtgcagataagcacgggagaagttctggcaggtgtagcagtcacaggtgggatccagcggcgaatcatcatggcgatggaacgcgttacggatcttcagcacgcctgtatcgatgaacagatgcccattgcgggcattacgggttggcatcacgcaatcgaacatgtccacaccgcggcgcacaccctctacgagatcttccggtttgccaacgcccataaggtaacgaggtttgtcagccggcatcaggcccggcaggtaatccagcaccttgatcatctcgtgcttgggctcgcccaccgacagaccgccgatggccaggccgtcaaaaccgatcttgtcgagaccttcgagcgagcgtttgcgcaggctttcatgcataccgccctggacgatgccgaacagcgctgcggtgttgtcgccatgggcgttcttcgaacgctgtgcccaacgcagggacaattccatggagatacgcgcgacgtcctcgtcagccgggtacggcgtgcactcgtcgaaaatcatcacgatgtcggagccgaggtcgcgctgcacctgcatcgactcttccgggcccatgaacaccttggaaccgtccaccggcgaggcgaaggtcacgccctcttccttgatcttgcgcatggcacccaggctgaacacctggaaaccacccgagtcggtcaggatcgggccttgccacttcatgaagtcatgcaggtcgccgtgcttcttgatcacttccgtgcccgggcgcagccacaggtggaaggtgttgccgaggatgatctcagcgccggtggcgacgatgtcacgcggcagcatgccttttacggtgccgtaagtgcccacgggcatgaaggccggggtctcgacggtgccgcgcgggaaggtcaggcgaccacgacgggctttaccgtcggtggcgagcaattcaaacgacatacgactcatagttgttcctctgggccgcgtggcgccgggttacgggtgataaacatcgcatcaccgtagctgaaaaaacggtatccattggcgatggcggcttgatatgcggccatggtctcgggataaccggcaaatgccgacaccagcatcaacagcgtggattccggcaaatggaagttggtgaccaggcaatcgaccacatggaacggccggcctgggtagataaagatgtcagtgtcgccactgaacggcttgagcacgccatcacgcgccgcactctccagcgagcgcacgctggtggtgcccaccgcgatcacccgcccgccccgcgccttgcacgaagccacggcatccacgacgtcctggctgacttccagccattcgctgtgcatatggtggtcttcgatgttatccacacgcaccggctgaaacgtcccggcccccacgtgcagggtcacataggcggtctcgacgcccttggccgcaatcgcatccagcagcggctggtcgaaatgcagcccggcagtcggtgcagcgacggcgcccaggcgctgggagtacaccgtctgatagcgctcgcggtccgagtcttcgtcggggcggtctatataaggaggcaacggcatatggccgacacgctccagcagcggcaacacttcttcggcaaatttgagctcgaacagcgcatcatggcgcgccaccatctcggcttcgccaccgccatcaatgaggatgctcgaccccggtttcggcgacttgctggagcgcacatgggccagcacgcgatggctgtccagcacccgctccaccagaatctccagcttgccgccggaggctttctggccaaacagccgcgccggaatcacccgggtattgttgaacaccatcagatcgcctgggcgcaaatgctcaagcaaatcagtgaattgacggtgtgcgagggcaccgctcaccccgtccagggtcagcagtcgactggcgcgacgctcggccaaagggtggcgagcgatcagcgaatcagggagctcaaaagtaaagtcagcaacgcgcatgatggggttcgtctagcagggccgggaagtctagcggaaatagtcaaaattgaccatgaaacgtgattgaccaacggtaatcacctctctatacttcgccgccattgagccctgatggcggaattggtagacgcggcggattcaaaatccgttttcgaaaggagtgggagttcgagtctccctcggggcaccatcttaaaaaaagaccttgaaattcaaggtcttttttttcgtctgcagaaaagtggtttgtccacgcaaccactacacacccacccctcccccctcacttatgcaagatcgcccgataaatatcctccagcgccatgatgcgctgagcggcgttgagtttgatggcttccttgggcatgccgaacaccacgcaactggcttcatcctgggcgactgtcgcggccccggcctcaagcatttccttgagcccgcgcgcgccgtcgtcgcccatgccggtcatgatgattccggtggcattcctgccggcgtagcgggccaccgagcgaaatagcacatccacggagggtcgatggcggttgaccagcggtccatcgatcacctgagcgtggtaataggcgccgctgcggttgaccatcaggtgcttgccgccgggtgcgatcagggccaggccaggcaggatacggtcgttgttgcgcgcttcgcgcacctcgatttcgcacacgctgttgaggcgctcggcgaacgaagcggtgaacttctcgggcatgtgctgcacgatcaccatacccgggcatacgcgcggcagtgccgtcagcacggcttccagcgcttgggtgccgccggtggaggtgccgatggcgacgatgcgctcggtggtctgggccatggcatggccattggcggcgggcaggatcgcatcggcagtgagcttgctggccggaaccagtggtgggctgacgctgcgctttcccaggttcctgacgttggagtttgcggcggcccggatcgcggccaccaactcggccgccgactcaatcaggaaactcttcaggccggttgagggcttggtgatgatttccacagcgcccgccgacagcgcctgcagggaggtttccgcgcctttctgggtcagcgaggagcagatcaccaccggcgtcggccgctcgctcatgattttcttgagaaacgtgatgccgtccatgcgcggcatttcgacatccagcacgatcacgtccggccattcccgcgccagtttgtccatggcgaaaatcgggtcggaagccgcccccatgacgtggatatccggcgtatcgctgagaatcgccagcagtacctggcgcaccacggccgaatcatcgaccagcagcacactgatttttttggtaggcatcttcttgaagtattcccattggttggtgccgaacccagacgttgccgttccacaggtcgaacatgatcgtgcggtaaccggtactgcccatgtcctgggcggtcaggtgcaggtgatgacgctcggccagggccagcgccgcgcgaatattcaggctggccacgtcctgcgtcggcaggcggcgttgcagatcaggaaacatctcgccgccaccgaacaacttgacctggtaatcccgtgcatgcgtgccattgatttgcgcgtggcgcagcagcagttccagtgcttcgtcggcataccggccatcgaggggctgatggttgcgcaggcgccccggcagcatgaagtgacacatgccgccgatcagccgctgcggatgccaaaaggtgatcgccacgcatgagccgagcaaggtccgcaggcgcgtcggccgcgttgcaaaactgacttggccaggcgccaataccacttcggtcgtacccacgggctttttcatggcttgcggtaaatcgacggcgccaccagcttcaaggtgtcattgacgccgtggaggctttcggagtgactgatgatcaaataaccgccgcgtttaagcagcggcaacagacgcgcgaccacctggctcttggtctgctgatcgaaataaatcatcacgttgcgcaggaaaatcacctcaaactcccccagcgccggcagcgcttcgttaaggttgacctggataaagttgacgcggttgcgcaaggtcttgtcgatcaggacggtgccctcctgacgtcccatgcccttgaggcagtacttgaccagcagcggctggggcaatgtctcaatgcgttccattgagtaatgccctgtgcgcgccttggccagtacctgggagctgatgtccgagccgatcacttcccagggcgtggtgccgaggctttcggccagggtcatcgccaggctgtagggctcttcgccggtggaactcgccgcgctccacacgcgaaacatccggcccggcgcggcctggggcaacacgtgctgacgcaggaagtcgaagtgcttgggctcgcgaaaaaaataggtttcgttggtggtcagcaaatccagcgcaacctgcagttcgcccttgcgctggtcattcatgatcagcttgaaatactcaccatagctctgcagctcatagtgcttgaggcgcttgaacaggcgcccggccaccagggctttcttggcgggcgacaggttgatgccggccgcccggtacagccaggtctggaactgaccgaattcacggtcgtcgatggagacggtgtctgacatgatcgagcctcaacgcaggtcgaggtcaggggccggcgcctggccggcctcggccaggctggacatctcgtcgatggacagcaccttgtccacttccagcacgatcacgaatttgccctcgaccttggccatgccactgatgaaatcggcgcgaatgcgcgcaccgaaactcggtggcggttcgatctgcgtggccgggatctcctgcacggcagataccgtatcgaccagcagcccgatgtcctgtggctgaccgtcctcggtactcgcctcgatgatgatcacgcaggaacgccgagtgatcgccgagttggcccgcccaaagcgcgccgacaagtccaccaccggcaccaccgcgccgcgcaggttgatcaccccgcgcacaaaagcgggcatcatcggcaccacggtcaggctgccgtattcgataatttccttgatccccaggatgccgatggcgaacatttcgccgcccagcatgaaggtcaggtactgcgcatcctcatcgaccgccaccgcagtctgccgagtcgtcattactgcacccatgtcactactctcccttgtaggcgcgcatcgatcgtgcgatcagaagcgggtgaaatccgattcgtccggggcactggccatggtgtaggcgaacgccttgcgcggcgccgttggtttagggcgtggcggctgacggttgggcgtgctgccagggctgtccgcgccggcgctttgaccagcagccttggacgctgaatccagcacgaagaaactcatggcctgttgcagttgctcggcctggctgctcatttcttcggccgtggccgccagttcctcactgctcgaggcgttttgctgggtcacttggttgagctgggtcatcgccgtgttgatctgcgctacgccagcggcctgttcttcggacgccgcgctgatttcctgcaccaggtcggacgtcttgttgatggaaggcaccatttcgtcgagcaacttgccggctttctcggccatctccacgctgctggaagacagttcgccgatttcctgggcggcgacctggctgcgttcggccagcttgcgcacttcggcggccaccacggcgaaacccttgccgtgctcgccggcccgagcggcctcgatggcggcattaagcgcgagcagattggtctggtaggcgatgtcatcgatgatgctgatgcgctgggcgattttcttcatcgccaccaccgtctgctgtaccgattcgccgccctcggtggcttccttggccgctttgctggccatgccgtccgtgaccttggcgttttcggtgttttgattgatgctggcgctcatctgctcgaccgacgcactggtttcctcgacactggctgcctgttcactggtggcctggctcatcgattgcgcggtggcgctaacctgttcggaggcgctggcgaggttatcggaggcgttacgcacttcgccgatgatatgggccagcttgccgaccatgttgcgcatggcgttgagcaccatgccggtttcatctttgccacctggctcgatgtgcgcattaaggttgccttcggccaattgctcggcggcgctcgccgcctggcgcaacggccgggaaatgatccgcgcgatgaatatcgccaggcccagaccgatcagcagggatgcggccagtaccgcgatgatcgacacgcgtgagctttcatacagcgccgagcccttgtcacccgcggcagtggcgccggcgtcattgagctcgaccattttctgcaggcggctggtcacctcatcgaaatgccctttggattcaccccggagcaaactgcgcgcctgggcttcctggttctgacgggaaaactccagaacctgcttgctgctcgcaatgtaggcgtcccatgcgcttttcacgctgagcaggagttgacgatcttcatcgttcgacagcaattgctcgtaggtctgcatgcgggtttcgaactcctggcgcgcttcggtggcttcgcgttcggcctgggccttttcttcgggaatctcggtaccgatgtggcggttttctttcaagcgatagttggcggcaaaaaaacgcatgcctgaggctgcacgcatggagggcatccagttgcccttgatgtcctgggcggcctggttgacggcaccgagctgaaggatagcgaaggcgcccatggccccggtgagggccaggaccaccaggaacgagctgatcagcttggtggaaattttaagatcgtagaaccatttcatcggggaacctccatggaattgcaaagacgtcagcgggcgacgagcggtggcgactgaggcgcctgggccgtgcgggcttccagttgtacgatttgattgagtagcgccggtacatccaggatcaaggccaccgcgccgctgcccagaatggtcgagccactgataccgcgcagtgcgccgaacaacttgcccagtggcttgatcaccgtctggaactcgccgtgcaggtcatcgaccaccagcccggccttgtgctcggcatagcgcaccaccaccacgttttgacggcgggcggccgggccttcgtggctgaagtggtcgcgcaggtccaccaggggcagcacctcgccacgcaggtccagatagccctgatcgcggctcgactggcgctggcgttcatccagctcgacgcattcctggaccatgtccagcggaatcacgtaggtggattggtcgacgccgaccaggaagccattgatgatcgccagggtcagcggcaagcgaatgcgcaccaccgtgccctggcctgggcggctgtcgaggtccacggtgccgcgcaacagcgtgatattgcgcttgaccacgtccatgccgacgccacgcccggacaggttggtgacggcctcggcggtagagaagcccgcctcgaagatcaggttgtagacctcctggtcggagagcaccgcgccgctggccaccagcccgcgttcctgggctttttccagaatgcggtcgcggttgagcccggcgccgtcatcggcgatttcgatgacgatgcttccggagtcgtggtaggcattcaggctcagatggcccttgctcgacttgcccgccgcacgtcgcgcatcggcgctttcgataccgtggtccatggcgttgcgcagcaggtgcatcagcgggtcgccgatcttctcgaccacggtcttgtccagctcggtctccgcgccgctgatgatcagctcgatgtccttgcccagttcctggctgacatcgcgcaccacgcgacggaagcggttgaacgtgtcgccgatggggatcatgcgcaggtgcagggcaccatcgagaatctcttctaccagcccggacaccgtcgaggtggcctcttgcagcgggtcgttgttacaggagcgcgccaacaggctggcgccggcgctggcgatcaccaattcgccgaccaggttgatcaactcatcgagcttgtcggcgttgacccgaacataactgccgtcgcgggttttcgcctcgctgttcgctggctggcgctggggcgacgcgggggccaggcctggctcggcttgcgcgatcaggtcactgccgatggcgacgctgcttgcgggcgtttcgtcgacggcgcggatgtgcacgtcacagtcgtcgcgcacgaagtcgaacacttcgttgagcgtggcatggctggccgtcgaacgcaggtcgatctcaaagcccaggtagcagctttccgggtcccagtgctccagggcggggatgctgtcggtcagggtggtgacctgcaccatttgccccagcgtatcgaggtagcgcaggaacgacagcgggtccatgccattacggaacacgtccacgccgaaacgcagagaaatatgccaaagcacgtcggcccccgtgtcgtcgtgcaccgcagcgggtacgacgtcggcggtggcgctgcgcagcggctggtagtcgctcagcgcctcgcgcaaggtctcaccgcgctccagcgtggccggggtcggcgtctcaccgcgactggcgaccacgtcgatcagttcaagcatgtggtcgccgcacttgagcagcagcgcaatcaacgccgcgtccaccgccacactgccatcgcgcaggcggtcgagaacgtcttcgacgatatgcgtgaaccccacgatcgacgcgaggccgaacagtccggcggatcccttgatagtatgcgcggcgcggaaaatcgcgccgatggcatcctggtcgccggggtcgctttccaattgcagcagggattgctccatggcctgcagtagctcgcgcgcctcgacgatgaaggtctgcagtgcctgatcgagattgatgctcacctggactttccttgtcgatcaatgaacgggacagtgccgcttaaagagcggcgctgcgacacagttggagcgcctgcatgactgcctggctctggccggtcacactcaaggcggtgccggcaatgccggcttcacgctggatgacggccagcaactgcaggccggcaccgtccatttccgtcacctgggacaggtccagttccaggcgcggcgccgcgcccatctgcggccacaacgcgcccgccagttcagcgacggtgtagatcgtgagttcgccgtcgatgcccacatgggtagtgtcgtcgattgtttcgtgagtgatcggcatgttggcctccctggcgccgggtgtcagggcaggatcaatttggagaccgccgccagcatctgcgccggctggaacggcttgaccacccacgccttggcgcccgcggcctggccttcggccttcttcgattcctgagactcggtggtcagcatgatgatcggtgtgaacttgtagttggccagcttcttcacctccttgacgaaggtgatgccatccatgttgggcatgttcacgtcgctgatgatcaggtgcactttttgcccggtcagcttgttcagggcgtccttgccgtcgctggcctcgatcacgtcgtaaccggcgcttttcaaggcgatgccgaccacttggcgcacgctgctggagtcgtcgaccactaatacattcttcgccatgatgtgctcctaaaagaaagtgatgtcttgggaattcgactgcactgccgcctcgccacgatggaggcgtcgttgctcgtcagtggcataggtggtttccatgcgcgccagccactggcgagcgtcgatgtccagcggctggtccggggtctggttggcctgttgcagatggtcatgcagggcgtgcatgttgtcgcgcacgtgactgaggatctggctgacccggtcctggaattgcaggttgaccaacacctcggtcatctcatcgcggatgccgtagctttcctgtttgagcaggtcggcggattcggccagacgcccagtgatgttctggaagcgtgtgagcaccatttgaatactgttttcggactcggccaccgaatggctgtcctggtcggcactgctggacgcggcctgcaccaattgagtaatggcgttattgatgatgtcgaccttggccgacatctgctggcccgtttcactggatttgctcgacaggctgcgcaccgcatcggccaccaccgcgaagccgcgaccggcctcaccggcgcgcgccgcttcgatggccgcgttgagggccagcaggttggtttgtgcggcaatcgctgccacatcagcggccatggtacgcagttcgcccgtataggcggtcaagctgcgcacctgcgccagggtctggtcacggctggtttgcgtggccttgagcgaattgatcacctggctcaactcgctgtcactgcgtgccagcacctcaagcgcgccgtcagcggcctgcccgtccagctcgccggccgcgtgctgcgacgcttgtaccgtttcctccaagcgggtggcgatcccggtgaaacggttcaccaggctcacaatcgcttcctcggtctgatggcgcgagctttccacctgcttggcccagatgggcatggcacccagcaatacctcatcgagctgtgcacgcgaggccaagccgttatgcgcgtgcgcactcgactggtccgcctgcgcctgcgcaatcgctcgctgcagcgcgttgcgctgcgaagccgcgctccaggcacaggcaccgaggccgatcatcaccagtaccgtgcaggccagcagattggccggcgaagtggattgcacgagtatccacacaacggccggcacgaccggaatcaaggcgaaccaacggaaacgaggataaacgggaaggtgcgtgcggctggatgggcgctggggcatgagttcgatccttgaacagtgttgcggatgtaaacgacatagaggctatccgcccctagcggctcaactttaggtctgttgagtaccttccgtctggtttatgaccggtgtgtgactgagcacggagttaagtgtaggtgacgcccgctgacacgcttaggctgcttgcaggatcgtacaagcgccctcgatccctcgttcgctaacctgacgactcttatccagcagagtctccgacatgtctcagtcacagcccccgacacaccccataaatctcatccaaaaagctgacctgatcgaccaaccatggagcccacgcgtcgttgcggagatgaacgactaccagttcaaagtcgtgcgcatcgaaggcgagttcatctggcactcccacccggaaaccgacgaggcctttctggtactcgacggtaccctgcgtatcgaccttgcagacggcccggtctatgtcgcaccgggcgagctgtacgtggtccctcggggcgtagcgcaccgcacagccgccgaaggcgaggccaagctgatgatgatcgagccacggggcatcttgaataccgggcatgaaggtggggagcttacggctgtgaatgaccagtggatctgaggctggcgtcgcctgctcgctcatactgttatgagacactcactccacttatcgtgtcagccttgaacaggtcaagacgcggccgccccggacgagcggccggtagggttatttcagcaaggcaatcagcgtgcagaccaccgtgatcgccagcgccggccattgcatcggcatgaaaaagaagtggtggcgcacgccatcggcgtgcggttgtcggttcagtacaaagcccagcacggtgttgatcgctgaccccgccccgaagccgagcaacacctgcatcagggatgtgttgccgggtttgacgctggggtcgggccacagccacattaatagcagcaccatcgccaccggtgtaaacaacgtcagccagcctgcgccgcgatagatcatcgattaatcctcacaacttgcgagtctgtgggggcctgggtgggaagtgagtgcatgcgtttttccgtccttgtaatgggtcaagccttgcaccgcccccgtctggtggccgagtgcatttggcacggcgagttggaacatggctaattaatattgttccttgggcaaatgacttcacaggggcgtgagcctggcagttcgcggtattggggtcttttttttcctgcgtagaacagtgatcatcgccctcccccaagccctaggaaccaagaccatggagttgacgctggaagctgttgcgctttttgcactgaagctggtgcacgagacggacggcggcagcccggtcttgcgggacgatccggtgatggatgggtatgagcgggaggtattcgggctgctggtgcggcagggagacttggcggccattcaatccaaagtcgcggaatgtgtggatcaagcgcttgaagcactgggcggggccgatacggtgatggggcgcgagttgcagcgcttggcgctgggcgtgcgccaagcgtcgacactggatgaactcaatgccccgctcaacgcactcaaggattacctgaaagccattctgtaacgcgcggttcagcgccgcccttccaccgccatccgcaccgccaaccccatcaacaccgagcccatcaaccagcgctgcaccacctgccaacccggccgggtaacgaaaaataccgcgatggaacccgccagggtggcaatcaccgcgttgacactcacgctgataaaaatctgcgtaaagcccagcaccagggattgcgtcaacacgctgccatgaccgttcgggtcgatgaactgcggcagcagcgacaaatacatcaccgctaccttggggttgagcaggttggtcaccaggcccatggtgaacagcttgcgcgggctgtccttgggcaagtcccgcacctggaacggcgaacgcccacccggccggatcgcctgccaggccatgtacgccaggtacagcgcgccgccgaaacgcagcgcgtcataggcaaacggcaccgccatgaccaaggccgtgatccccaaagccgcgcacagcatataaaccaggaaacccaaagccacgccccccagggaaatcaacccggccgtgcggccttggcagatcgaacgggagatgaggtagatcatgttcgggccgggcgtgagcaccatgccgagtgaaatcagcgcataagccagccaactggacagttcgggcattgttgggctcctggggtgttaggttgtcagcgaaatatttggtcaaggttgtcggcttggccgccatggtagggcgttcaaaatgcgcgcgttagatacagatccgcgagcaaaacggcatacacccaagaggcaggacatgatcgacttcaacaacaaaggcttcttcaagctcaagcaaaacaacgaatacgccgaacgcgtcgtcgccctgctgctggacggcgaagaagtgatcgacgcttacaaggccatgcgcgacggcgtggtgttcaccaccaagcgcatcatcgcggtgaacgtgcaggggattaccggcagcaagaaggatttcacttcgctgccgtataaaaatatcgtggcgtattcggtggagacgtccgggacgtttgacctggattcggagttggagatttatttttcgtcgctgggcaaagtgaaattcgaatttaccggcaagacctcgattgtggaaatctcgcggttgatttccaagcacctgctggcctgatcggcaggcaattgatttagacggcggtcccccaatcaaaatgtgggagggggcttgcccccgatagggccccctcccacaccatcaaaccacagccctacacaccaacgccttccccttcctccaccgccccattcggcaacatcccattcgccaaatcatccaccactgccttggccatctcccccaaataatgcgccgcccaggcatagcgatctgcactggaatccatggctgcatccaacgccagcaacttggaacagtgcaacagctcggaggcatgctccagggcatcacggatgggcacgccggaattgacgcggaatagacggtggaggttcggctgcttgccgcaggtggagaaggtgatgatgccgagggtgttgttgaggggtgggttgatcattgggcacctccagagtggttggagatgcttacgatggtattgcgtgggtacgacctgtcagaaacgctcattggcttaactcctaatgtagataagagccgccacgttcgtttccaggcgagtgggtggcagctatgcgcaggctggaaaaccgggacaataggaacccggcagacccgaaggtctcccgcgcacagccgccataacacgaatatgctggcacaaaaacaccagcaatcgtgataaatagtggcacctgtgcgctattgttccacgggtttccaggcccgatcgccgaatgtcgacgacacgccaaaagtagcctaaagactgattagcggaaaatcggctttgtggctaaacgtgtctgatgaggcagaaaaaaattaactgaaatcaaaagccaataactctttattaaacaatataaaagcagtcgacgagaccagcacacatatgaaacctgagcaaaagacattaaatttagattcattttactcggacatactaaaagaggacgaattaggagcagccatccgcacgcacatttatatagagtcagctcttgagcagctgattgaaatattagtttcagattatgagcacatcaaaaagatgcagctcgacttctctcaaaaggtaaacctagcagttgcggtaggaatgccaaaagatttcgccccagcacttttagcagtcgggacgattcgaaataaatttgcgcacaggattgacacaaaaattgacaaggagaaaacaaacaacctttacaaacagctttcacccgaccagagaagtgcgatacatgcatcattcaaaaacacgctaaaaaaaacaccactagatcaagcgaggaatctttccgacatcacacctaaagagcaatttgcaattttatctgtagcattattaatgcaaatcctcaccctgatacaggcacacgatagataaaaaagctgaattgattggaaccacacagtacttttattaaaagcgtgatcttagcgagaactgcaccgttcgtatgaaatttacagcatcaactcataaggccccagcaccttactagtctgcaccaacccctgccgcatcaacatctcaagataactccccgcctccatcggaggccgcttcaacgcccgcctctgcttctgcgccgctcccagcaccgccgcctgatccagatcccaaagatccgaaataaagtcatctggatgcatcggctcaatatcataagcagacagaatgtgcgccgggaaatctttcaaattgaacgtcacgataacctcagctttgctccgaattgccgccgccagcacgtgacgatcatctggatcgggcagatccagactcgagcacagatcctcatatcccgtcaccaaagcgtcaggtatagccttgtccatcagcgctgacgtgcaattcacttgctccgccgtcagatcgggccggttcttgagtacgttgcgcttccactcctcatgaatctggcgggtccatctcgctcgatacagccctgacaagccaagccacatcagtaaatcccgaagcgctgccgggtaaagaacacaagcatcgtatacagcagtaaaaggcgaacacctcatccgtcataccccattcccaactcctgtgcctgttgtgccaacgcttccatcgcctcctgactttcctcatccctccgctgcttgaacgccatcaagtccgaaaaacggatgcgtcgatgccgaccggtttttgtaaagggaatagcgccctcctccagcatcttgaccaagtgcggccgtgaaacgttaagcaggtcagccgcttcctgcgatgtcaattcagcgtgcaccgggactaccttgaccgcattgccgatcgctaactcgcccaaaatatcgaccagcaagcgcagtgctgaggtggggagtacgaggctgtgaggcttatcttctttgtcgaagatgtcgatgcgctgggtttcaaatttggtcgacagcagcgaggccagctcacgctggccttgtacggcagcttcgacttccttttccagaggaggaatggttttagggaggtgattggccatcatgatgcaactccggtgtttcgaaattcagttgagaccaaacctaaacgaaacaaacgaaaatcgcaatattcgaaacaccaacatcgggcgctacccaataggctcctacttccgcttggtaagctcatcacctccttcgcagaaacctgcgataccaacccactccacccgccacggccccgacaacaaccaccccattccccaccagccaaagcccaaaattccggctctgctccgcatccccctcataaaacggcccaaaatacgccgataccaccactaccacaccgttaaacaccccaagtgccaccgcaaccaccagcacaacaaacaccacccccttaaccactttcaggcaaccttccaaaaccagatctccctggactcgtgataatccgagaacgtcccttcaatcgaaaaccctagttgaatacgcggatagctcaaccagtccgtcaaccgccgcccgttccataggtcgatgtgatcaccactgcgattaccaaacgtttcgtttccccggcgccaaaagtctttgaagaagatgatgccttgttgcccagtcaactcatcctcgaagttttcgggttttatctttttcatgcttcgtaaaccggaagtgacgatacggcttaatgcgttggccatttcctctgcggccagtatgtgcccctcgcttttgggatgctgccaacaatagcgcacgctgcttaatctgctcaggtcaacgccagatctacgcagtgccacttcaagattgatcgcgcattgatcactgaaattcttggcgccgttggttctgcatggtgctgcgtcgccaaagatttccgggtggtttttccatagggtgttgaatgtcagcattctgcttttccatgcgtattttttccgcgaccgtagcaaacacggtgcggctgaagagaactccagagcgaatccagaaaggtcctacgcaagaactagacctggtttgcaggacaacacgcacatacctgtcgcgcgtggatcaaggagctcaaacgctcgccttctagagcgctgacaacctgttgccttttcccacgccagccatcgaacaaagccaatacctcccatcgctcccccctcgtaggctcacctcctcgcacaaggaagtgagcccgtcatgccagaacgcttttacccacccaccgaagaagagttacgcaaacaacgcatcctggcaccgcagccatcgcgtgcgccgtattcgccatcggttgattttttcgagccatcccctgtcccagcccctacgcgagccagacctcccggctgcgtcttcatgaagccttgccaattgcctgacggcatcactcattacttcaacccggcagggtatgtgccgttggagctgatcagggagtacggccacttaagcctgctgggtgggcgtgaggtggacagcaggggcgcggttgccttgcgcaagatcggcggcagcacattgcccgctggcttggggcagttggcgttgcggtcggcggtttgggagtcggcggcgactgccgttggatcggtcgccgggggcctgctgacgggtttggtggcgctggcctggccgtcagagttgggtgatagcgcgctctacaacgaggagcagttgcgttcgatgcaacgggcgcggtcgcagatgcggttgcatatcgagcaacgcgaggacggcacgctcaaggggtatgggttctacacgggcaaccatgccgattggcagatgattgatgtggtgcagtttcaacagcgtaacgatcagtttgtggcggatttgggtgagggtgtggagctgatctggacgcccgccgttgatcccagtgacacgctggggattccggccttggaggctgcgccgcaagcgccggtgatctggatttatccgccgacggagaaagcggcgcagattctggtgaacccggtttatccaccggagtatcgggattttattctggtgttcccggtggagtcgggggtacggccgctgtatgtggtgctcaacaagccaaggaaaggttggcttacgtgaacgttggatagacgcaaaaggaagaaaaatatttgaatgggattccaagaaagccgagctggaagtctatcgaaacagtgacttggaacacctcggtgcatttgatccttataccgccgagcgtcgaggaccggcggatccgaaacgtcgaatttatagataaagaggattttgaaatggtgatgaaaatcagactgcgatggtacgaaaagcacagcaatgacttgaaagcggatgaatactcagcggatatcgcagacccagacagtatttttgaagcattgggcttaagcgaagagaccgcgatatatgccgacgtattcaacgtccaacccaattggataacgctaattcagccgtacttccagcacgtgatccaacccaaccacctcgactaccaaatctccttccgctaccaaggcgcctggccaccgcctccaaaacagtccaaaaaggcgtcgtgatgcaattatagaacagaagagaaagacgcgaaaacgtaacggcggcggtcttcgggaacgttggaaggacgcgaaaggaaagagactttttgagtgggattcggaacaaggtgagctggaagtccaccgatacagcgatgtgaaacacctaggttcatttgacccatatacgggagagcagcggggcccggcgaaagatgaacggcgaattacaaaataaacggagagtcaatcatggtgatgaagataagactggaatggtttgacaaacaaaccgaaaacttagaggcggacgaatactcagcaaacctcaacgaggatgatggcattctcaaagcactggacctccatgacgagcctcaaatttatgccggaggattcgatgttctcccaagttgggtagcgattctccagccacatttccgacacgttatagagcctggccttttcgactaccaaatctccttccgctaccaaggcgcctggccaccgcctccaaaacaatccaaaaaggcgtcgtgatgcaatgaaacccacatcgcaaaaacccctcctctaccgctcagtcaacacccgaacccatggcgtgcgccacggcagttgtcgcgcctaccggtatgagcggcacaccaaaggcgaaaaagacaaacaatcaaaccgcgggtcgatgcatagccatcaacggcatggctttgattacaccccgctattccgctttctcctctccaaagtcggccacccatgggaccaggtgttcagcgaagccaacgcccgcctggatcgcccagagccggtgttctggatggtcgcgcaacatgaaagcgacaagcaggattacgtgagaacggatgaaaacagctactacagcggcttgtatgtcgacgaaggcggcctgctgcaaaaggtcaacccacagctgacgcccgagcagatgaaacccttctgcaactgcagcacccacaccttcaacggtgtggtattcccgcagggtctaccacacaacggctaaccctcaacccgacttaaccccactccccgcctcagccaccggtacccgattcgccggatcggtcacgtcatacacatgctgctcacaccccgagcccttgaattggaattccaccaggtacacctttgccttctccgggctgaacgtattcatcactggcccgcaggtgtagtagtaaccggtgcgggtatcgttcgcgtaccccgataccgtgagtttcttgccggggtcggcctggatttccagttgtgggaatcgcttgaagcccgcactggccacggtctggttgagcttggcgatccagttgaagaccttgccttcgccggtgtccatcacggtgccgagggcttccatgcgtgggtcggggtcgccttcgcggctgatcgagaagtcgacggcgggagtgccgccactggacttcatgatgactttggcgtgttccgcatccacagccacggttttctggcgaaactgaatgccgtccttgagcaggctgggcgatgagtcgcgttggttggattggcaggcgcccagggccagggcaatggagagcagcgcgattcgcttcacgggggatgtccttatcggggaagagtgtgatgactggacccgaatttaaacggattgttccgcttcaggagggatgagcgatgccgccgttcaggcgctctcaaacaccaaccgcgcgcacaacccaccctgcttgcggttatgcagcgccaaccggcaaccgatcttgcctacgatcatctgcacaatcgccaaccccaagcccgcgccattggcattatcccggctgtagaaccgttcgaacaggcgctccatttgcgcctcatcaatcccggggccccggtctttgacactcaaacaatgagcccccatcacgactgtcacttcactgcccgccggggaaaagttaagcgcattggtcaccaggttttgcagcgcaatcgccagcgccacgggctcggtttcgacccagcagtcttcgttgccttcgagcaccagctctacgcctttttccatggccaggggggtcaattcggcgagttcttcgcgcaccagttcagtcaggtgcacacggccgcacacggggttgtgcaactggggttcgatgcgcgccatggtcagtaactggctaccaatacgggtagcgcggtcgacgccattgactagaaaatccaaggcttcgcggcgctgttctccagtgacggcgctttgcgcgttctgcgcgtgaatgcgcaggatcgccaggggcgtgcgcagttcatgggcggcgtcggcgatgaagcggcgttcgcggtcgagcagttcatccacttggaccagcagccggttcagcgcggtctgcatgggttccaggtcggtcggcagtgggttgaggtgcagcggttgcaaggtttcggtattgcgtccacgaatcgacaacaccatggcgcgcagcggtttgaagccccagccgatcaccagccagatcagcaccgtcagcagcggcacgccgatcagcgtgggccacagggtgtggcgcatgatgcgctggatcacgtcctggcggatgtcgtcgcgctcacccacccagatcaacacgccctgttgcgggtcggtgaggagaaaggcgcaccagtcgttgccgttgtccatcaggtcatgggagcccagggtggtcggcggcgccgccagcaccggcgcttcggcggagcgcaccagcagctcacccgcgctgttccagacctggaaggtcaggcgggtttcatagggatgggccacgccgtcctcgccgacgcggctcatggcctggtcgaacgcctggtacaaccgttcccaacccgcgtcctcagggtcacgctggcgcagcacgccttgcagcaggcgcgcactctgggcgagttgggcgtcgtagacttcttcgatttcgtggtggctgtcgcgcagtaccaaccagctgatcaaggcatcgcccaacaggatcaacaccaacaccgggatgaggatgcgcgcgcgaaccgaggtcatgcggtgagtaccagcacatagccgacaccgcgtacggtgcggatcaactcggtggataactttttacgcaggttatgaatcagtacttccaacgtgttgctctcgacccggtcctgccagccatacaacgcgcgggacagccgctcgcgggtcacgaccttgccggggcgcaccatcagttggtgcagcagttggtattccatgggggtgacgatgatgtcggcgtcctggtaacgcacctgctgcgtggccgggtcgaggctgacgccggcgtgttccagcagcggttgcgcgcggccctggctacggcgcaacagcgcacggacacgagccttgagttcttccacatcgaagggtttgaccaggtagtcgtcagcgcccgcgtccaagccggcgatgcgttcggcggtgccgtcgcgggcggtgaggatcagcaccggcaagtcgtgttgctcggcgcgcagttgctgcaacaggtcgaggccgtcgaggcgtggcaagccgagatcgagcagcagcaggtcgaacgactccgtgcgcagggcatgcagggcggcaacgccatcttgcagccagtcaagggtgtagccttcggcgcccagggccacgcgaatacccaggccgagggcacggtcatcttcgacaaggagtaggcgcattacggattctctgtaggaaacggcgaaatcatgccgggtttcaccggcgcaccctcggcaaagatgttactgctcgttgccaactaagcttgcactaaggttggttttgcactgtgcaaactcctacgtttgctgagagcttttccatgcgcaaaattctcctgctgtccctgattctcgccagccccctggccgtcgccggcccgcagtgcaccaccgccgaacgctcgcaatggcaggacgaaaaagccttccaggacaagctcaaggccgaaggctacaccatcagcaagttcaaggtcaccgacggcaattgctacgagatctacggctttgacaaagacaagcgcaaggtcgagatctaccacgacccggtcaccggcaaagccgtgaagaccgagatcaaaggctgatgccgggcgagtccctgcacctgtgggacccgttggtgaggctgtttcatctgtcgatcgccggggtctttgtcgccaattacttctttaacgaagcaggcgacgactggcatgtctggctgggctactacgccatggcctggttgctggtacgtggggtgtggggatttgtcggaccgcgtagcgcccaatggacggacttctggccgacgccacgacgcctgactgcccacctacgctcgctcctcagcggtcggccacagcatcgcctgggccattcgccgattggcgcgctggtgatgctattgatgttgctggcgctgctgaccctcggtatcagcggttttctgatgcaggaggtcgacgccttgtggggtgccgattggccgctgcaaatccacgagactgcggccaatgtgcttttgggcctggtctgcgtgcatgtgctggcagcgatcgttgaaagcctccagatgcgggacaacctgcccttgtccatgctcaccggtcgcaggaagcgcctgccggatgaacgtgcgccgtaattctttgacccacaggttctctatgcgctccgtcctcctgatcgtcggcctgctcgcggtgtttttcgccgcctggcaaagccatccgccccatgtactggcaccgtttgcccaggtgagcccgaacaccgccaaagtggcatcggccccgcagtacaccagccggtttgtatcgacacagctcaccgactttgtgcattcctcgtccgtcaccgccctgcccggtggcgacttgatggcggtgtggttcgccggttcccgcgaaggcgccgccgatgtgcaagtgcgtaccgcgcgctttgacgcccacaccggagaatggggcgccgagcaggtactggccacacgggaaagcacccgcgacggcacgcagcgctatatccgcaagctcggtaatccggtgattgccctggcgccggaccagcgcctgtggatgttttatgtgtcggtatcggttgggggctgggccgccagtgcgatcaatgtgatggtatcggatgacctgggcgccagttggtcggcaccgcggcaactggtgacgtcgccgttcttcaacatcagcacgctggtgcgcgccgcgccggtgttccatgccgatggctccatcgggctgccggtgtatcacgagttcatgggcaagtttgccgagtacctgtacttgagcgccgacggggcggtgatcgacaaattccgcatcagccgcggcaagcattccctgcaaccgactatcgtgccgcaggatggcctacgcgccgtggcgatgttgcgttacgccggcgacacccaccaccgcgtgctggccagccgcaccgaagacgccgggcagacttggagcgagccctacccgctggcgccagccaaccccaattcatcgctggcggcggtgggcacgcaggatgatggtttgctggtggctctcaatgacttggaggacggtcgcttcaagctcagcctgtatggcaccgacgcacagctcacacagtggcgcaccgtggtggaactggaccagtcacccgacccgctcggccaaccgttttcgcccgaggcctataaagcaatcatcggcgagggcttccgcgcctccagcggtgcccggcgcctgccgctggagcagcgcttcctcagtaacctcgactaccgcgtgtgcaaaccccagggctgcgatttcgaatacgaatacccgtatttcagccgcagcccggacggcatgtaccacctggtgtattcgtggaataacacctttatcaagcatgtcagcttcaacgaagcttggctggcggagcgtctgtgatggttgctgtgtggcaggcccatttgagttttgtgttgctgggtttcgtggcgctgagcgcgctgcgcttcaccgaagcgtggcggccatggttgctaccggtgttggtggcggtgagttttatcccggtcaatgcgctgcccctggcggcgtatgtgcgcagttttactgatgacttggcgatcagcaccttggtgttgttggcatgggtggggttgtgccggctgggcgtggtgcgggcgctggatcgaccccatcaggtacagatgctgctgctctttgggctgctgagcctgttgctgtaccccgccaccttgggcctgacctatttcgatccttatcgttggggcttcaaccctcgcccgatgattgtgctagtggccgtggcggcactggtgatgctgtggctgcgcaacacgctggcggtgtggatgttggcggtgggcacgctggcgttcgcgctgcggctcaaggcatcggaaaactactgggactatctggtcgatccgctgctgacggtctactgcgtagtcgccggactaatgcaattcaaactgtgggagcgggcttgcccgcgatagcggtgtatcagttaccgctatgtttactgaaccaccgctatcgcgggcaagcccgctcccacatgggttctgcgtcgttttaaagaatgggaaaaataatgagtgcgttgcaatcacgccgcctgcgctacggcgtgggcgcgatcgggttggtgtttgtgttgctggccgcgttacggctaatgtttgtgctgggtttttccggccttggcttcagcactccggccctgctggaaaccgtgggcatcggcctgcggttcgacctgcgcctggcggtgctggtcctgctgccgctggccgtgctggcatggctgccgcgctggaacctcatcactctgccggccctgcgctggctggcacgcgggtatctgacggcagcgctggcattggtcggcctggtgtacatcatcgacttcggccattacgcctacctcggcgtacgcatcaatgcgacggtgctgcgctacctgcaagacgcacagatttcacaacagatggtgtgggaaacctacccagtgctgtggataactgcctgctggctggcggcggtggcgctgtgggtctgggcgctcgtctgtctcgaacgattgacactcgaccgtgcgcccagcgccagcggcaagctgtccttggtcgccgtttccgccattgcagtggtcggcgtgctactggcgctgctcggccgcgtcgcccatctcaatctggagaacccggtgcccttacgctggagtgatgcgttcttttccggcaacagccaagtggcggcggtaggactgaacccggtgctgtttttgtacgacaccctcaaggtcggccagtcgcagtttgatgaagcccaggtgcgcaagcattacccgcagatcgccgactacctgggagtcgaccaacctgatgcgcagcaactcaactttattcgcagccagagcgtgcagccgtatcgcctggcgggcgagcgcccgcccaatgtggtcttcgtgatgctcgaatcccttggcactagcgccgtaggcgcctacggcaacccgctcaaccccacgccgaacctggacaaactggccagccaaagttggttcttcaagcacttctacgtgcccgtcaccggcaccgccaagacggtgtgggcgagcatcagcggcgtgccggacgtgacccgccaggaaaccgccacgcgcaacccgctgattacccggcaacacacgctgatcaacgcgttcgagggttaccagaagttctacatgatcggcggcaatgccggctgggcgaatatcaacgcgttgatccgccagagcatcgacggtgtgcagctgtatgaggaaagccactggcgttcgccgcgggtggacgtgtggggcatctccgaccttgacctgttcaaggaaggtgacgcgttgctgcgcgcggtcccgaaagaccaaccgttcttcgcctacctgcaaacctccggcaaccatcgcccctttaccatccccaggcacaacgatggtttccaggtaaaggacgtgaccctggagcacgtccaggccgccgggtcgcgcagcgtcgagcagtacaacgcggtgcgcttgctggactacaacatcggccgcctgatggaaatcgccaaggccggcggctggtacgacaacagcattttcgtgttcttcggcgaccacaacacgcgcatcagccagatcccgcacatggcgccggcctttgagcagcttggtttggagagcaataacgtaccgctgctgatccacgcccctggcctggccccccgggtgatcgaggaggccgtggggctggcggacctgttgcccaccgtcgccggcatggcgggcataccgtttcgcaatggcgcgctggggcgtgatatccagcagccggcgcccgaaggcgaacgcgtggtgccgctggtgttgcgcgaaggcaccttcccgatcatcggcggcgtcacccggcacttcctgctgcagatgcaacacgacggcagctcgccgaccctgcatgacctggcctcacccagcccgcgagagaacgtagccgcgcagcaccccgaagagtttcaacgtttgcagggcttgacccgagggctgcatgagagcgcacggttgatgctgttcagcaacgtacgagagtgattattggggctggaaagtttcgaggtaggccaggatgtcggcaatcttgtcctggtcgctgatgccccaaaaaatcatccgcgtgccactcaccaccttcttcggcgcttcgatataggcggcgagcttgtcgcgggtccagaccacaccggagtttttcatcgcgtcggaatattgatagtccgtggtcgtcccggcgggcctgccaatgatgccgttgagctgcggaccaaaaccgccgcgcgcaccttcgccgatgctgtggcagccgccgcaggtcttggtgaagagtttgccgcccgcctcggcgtcgccggccgccaaagcggggcttgcgttgagggccagggcgagggtgaacagggcgtacttcatggcagactccacagcagttgtagcgggcgattatgcctgtttgtctggagcgcatgctcatccagattaccgtttcagtccttggggtgcgcagcgccactatcctcccgccccccttgcgcaaatgtgcaacctagaccctctgaatgaccatccatcgcttcatacatatccaatcgaacctatgcagctgtgttctactccacctctatgaaccctgatggtggagtaaggatcatggctcagccatcgattttggtattggaagacgacgaaatcattcgggcgttgatggtggatgtgctggaggaattcggcgcggtggtgacgtcgtttccttcggcggatgaagggatgatttacctggagcggggcgacgatccggtggacctgattgtcagcgatatccagatgccgggtttgctcaacggctacgatctgagcaaggtggtggcgcatcgttggccgacggtgccagtggtgttgacctccggtaatacgaagctggcgacacagttgggcggctcggtgcggttcctgcccaagccctggagctccgaacatttgatccaatgtgtgcaaaccgcgctcacccagcaaggtctatccatgcattgatagcgcttcaacatcactcgaaccgaacttcatggcgggcgctgtggtcattgatgaagcaaggagcgacttttctgatccgctggtcagccttttcgccttgtgcgtacagctgcctgccttgagttgtgtagaattgtcgcccattaaaacgcgtcattcatggccgagaggcccacagttcgagctcactgaatgcattcacaggcccatgacgttggtgcgccctctttgctggaaacgttgcgcacaggcacggccctgctgcatgtggcgttggaaaagcgcctgccgtttttctctgagcgcctggatgccgattggtatcagcgcttgcttgaggcgtactacgggttttatgggccgatggaagcggcgttgtacgaatgcgatttgatacctgagggcttcgaccaggggttacgtacgaaaaccccgacgctagtgcacgatctcgatgcactgggcctgaatgaacaggctatcggcgccctgccccgctgcgccgaactcccgaatctcgacacccccgccgcctgcctcggagctctgtacgtgctggaaggcgcaaccctcggcggccaagtgctgcgccgggaaatggctcagcgcctgagcatcaatgccgacaacggtggagcgtttctcgatgtatacggcgccgaaaccggtcgacgctggaaagactttctcgattacctgggccgcctgccgctggatgcccccgccaaacagcgcgcggtagaggcagcccgttcgacattccgctgctttgagcaatggctcgacagccaggaggtactgctatgaaacccgaagattttgaagagctgcttgccaactgtgccaacgagccgattcgcttcccgggggcgatccagccccatggcgtgctgctgacattgtccgagcccgagctgaatatcatccaggtcagcgccaacgtgggcagcatgttcggccatgcgcccgaggcgctgctgggccagccgctgcacacgctggtgggcgccgagcacgcccaggccgttgctgccatggccgaaaacaacacgttttttgacgcgccaccgctgcacgtttcctttaacggcgcagagttcgaaggcctgctgcaccgccatcagaatgtgctggtgctggaattcgagccgcgtctcaaagacttccgtccacgggcactgaacgggcgcaccagtgaccagggcaagatgctgcaacgtttgcagtcggcgaaaaccctgcaagcgctgtacgaaatcagcgtgactgaaatccaggccatgaccggctacgaccgcgtgctgatctaccgcttcgaagacgaaggccacggccaggtgatcgccgaagcgtcagcgccgtccatggagctgttcaacgggttgttcttccccgcgtccgacatcccggagcaggcccgcgagctgtaccgcaccaactggctacgcatcatcccgaacgcggcctacgagccggttccgctgttgcctaagctgcgcccggacaccggccagccgctggatctgagctttgccaccctgcgcagcgtgtcgccgatccactgtcagtacatgcagaacatgggcgtgttgtcgtccatgagcatctcgctgatgaagggcgacaaactctggggcctgatcagttgcggcaaccgcgagccgctgctggtgccgaacgacttgcgcactgcctgccagaccatcggccaggtgctgtcgctgcagatcagcgccatggaggccctggacctgagccgccagcgcgaagagaaagtcgaggccctggcgttgctcgaccaagcgatgaagcgctcggcagagaacgtattcgacggcctggcccagcaaccgcagttgctgatggacctgaccttgtccggcggcgtggcgatcatcgaagacaaacaactgcaccgctacggcaactgcccggaaccggcgcagatccgcgccttgcacaagtggttgcaagcgcgcggcgagccggtgttttccagccataacctggtgtcggtttacccaccggccgctgagttccaacaagtggccagtggcgtgttggccatgagcctgcctaagcctgtggacaacggtgtgctgtggttccgcccggaagtgaaggagaacatcaactggagcggcgacccgaaaaaaccgctggacctggaaaactctgacgccggcctgcgccttcgcccacgcacctcgtttgaaatctggaaagtggaaatggccggcatctccaccaaatggagccacggcgaccactttgccgccaacgacctgcgccgctcggccctggaaaacgacctggcgcgccaggtgctgcgcgagcaacaagcggtgcgtgcgcgtgatgagctggtggcggtggtgtcccacgacctgcgtaacccgatgacggtgatctcgatgctgtgcggcatgatgcaaaaggccttcagctccgatggcccacacacctcgcgacgcatttcctcggctatcgacaccatgcaacaggccgccgggcgcatgaacgtgctgttggaagacttgctcgacacctcgaaaatcgaggccgggcggtatgtggtcaagccggtggcactcgacgtgacccagatcttcgaggaagcctattccctgctggcaccgctggcgatggataagggcatcgacctgtctttcaacgccgagccgggcctgcagatcaatgccgacccggagcgtctgttccaggtgctgtcgaacctgatcggcaacgcgatcaagttcactccgcgccagggcaacatcggcatcagtgccatgagcaatggcgaagaaattgtgttctccgtgcgcgactccggcgaaggcattgcaccggaacaactgccgcacgtgtttgaccgttactggacccagacggaaaacaacccgaccggcagcgggctggggctgtatatcacccaaggtatcgtccaggcccacggcggcaagatcgttgccgagagtgaagtgggtcgggggagtgagttccggtttacggtgccgaaggtgatcgacgactcgcatacctgagtgggtggtttgagggctgctgcgcagcccagcgcggggcaagcccgctcacgacaaggtccccttaaaccggcagcaccacaaccgcttccagccctccgccgtggcgttcggtcagggtcagggtgccgccgtgttccagcacaatcgcccgggcggtcgagagccccaagcccacaccgcccgtgcttttgttgcgtgagccttccaggcgatagaacggcaggaacacctcctcccgatgttcagccgcaatgcccgggccgcgatccaacacgcgaatcaccacctcgtcctgtgtgtgctgcaactcgatctccggcgcgacgccatagtggatcgcgttgtccacgaggttggtcatcacccgcttgagccccaggggcctgccgaaatacaccaggcgtggcggaccgtgaaaggtgatgtcgagcgcctggtcgcggtagtcgtcgatcagggtttgcagcaactcggccaggtccagttgggtggccggttccaggcgggcgtcgtcgcggaagaattccagggcggtgttgatcatggcctgcatttcatcgacgtcgcgaaacagccgctgctgctggtcggcgtcttcgatgaattccccgcgcaggcgcaggcgcgtcagcggcgcacgcaggtcgtgggagatggccgcgagcatttgcgtgcggtcctggatgaagtggcgtaactgcgcctgcatgctgttgaacgcaaggatcgcctggcggatttcatgaggccccaccggttcgacgggcggtgcgcgaaagtctgcaccaaagcgccgaacgccgtgggcaaagtcctgcagcggtcgcgccagtcgccgagtggccaccagggtgaccagtgcggtggagatcagcaccagcaataccacgatcacactgcgtgcgccctcgtccaggccccagctgcgggcaggcgcggtgaacatcagccaggaatgatcagccagttgcatcagcagcatgtagtggccattgccgtcgggccaatcggacggttcataggcttccatagggcggatcgggccgtcgagcaggtgctcgaaggcctgttctcccgactggaaatccgggtcctgcagcacgggcaaatcaaatgctgttcgctgcgccgaccacctcacgctgaacgcgtcgtcagccattacttctgccagacgcggtcgttgcgccggcgccgacgcttcgaccacgcgcaccaccacggcgattttttccagcaggccggtttcggtgagcggcggccgtgcccaaacccccgccagcttcacgaacagggcgttgaacgccaatgcggtgaacatcgcgatcagcaccgtcagggcgatccagcgggccacggtgtcgcgtgggcggcgactcatgagcgcgtcacgctgacggtgaattggtaaccgccgttgcgtaccgtgcggatcatcgccgggcgtttggtatcgaattccagcttgcggcgtaggcggctcacttgcacgtcgatgctgcgatcaaacgcgtcgtggctgtggccccgcgccaggttcaacaactgctcgcgggtcagcacgcgctgggggtgttcggcgaacaccagcagcaggtcgaactcgccggacgacaacgggatcatcacctggtcgggcgagcgtaattcgcggcgcgtgagatccagttgccagccagcaaagcggatcaatgggcgggcgacctcccccatcggcggtcgcgcttcacccgcacggcgcatgactgcgcgcacccgggccagcaattcgcgggcatcgaaaggtttgctcaagtagtcgtcggcgcccatttccaggcctaccacgcgatcgctgagttcgcccatggcggtgagcatgatcaccggcgtcgcatattgctggcgcaggcgctggcacagcagcaggccgttgtcaccgggcagcatcaggtcgaggatgatcaggtcagccggctggcgctccatggccgcccacagctcggcgccactggcagccgtctcgaccccatagccgtgttgcaggaaaaattttttcagcagggcgaggacttcaaggtcatcgtccacaatcaacaagttgctcaccgacggtcttcactgggtggggtcgaggcgctatctaaaaccattcggcacggtccgtcatatatttcaatcgtgcaataaagcgtcaacggcgcaataaaccagacatctttgcgcaaggtcgcactgccaggatcggcctcccttttttgcggagactgtgcccatgtgctcgctgacctacccccggcatctggcccgccaggccgtgctgttgctgacagtgtcttacctgacgggctgcgcaagcccggccccggtagagcccgcgactcgctgtgcgcaggtgaattacccggtgtatgacccggccgagccggtcaaccgcggcgtgttcgcgttcaaccgtgctgtagatgactacgccctggcaccggtagcgcgaggctaccgttacctgccggattttttccagcagggtgtgcataacttcgcgagcaacttcagcgagccggagatattcatcaacgacctgctgcaaggcaacccgagacggtcggtcaataccctggggcgcttcgccgtgaacacaacggtgggcgtggtggggttgttcgatgtgtcggatcgcctgggcatcccgcgccataaagccgacttcggccagacattcggtgtgtgggggatcggcaatgggccgattgtcgaactgccgttgctgggcaccagcaatagccgggatgcagcgggcaaggtcttgggcttcctggtttcgccactgggcgacagcgataccgtgcaaaccctgggcaccatcagcctggtgggcggcaccgtcgatacccgtgcgtcattgttgccgctcaccgacagcctgcagaaactgccggattactacagcgcgttgcgcaatgtggtggcggaaaatcgggcggcctttgtacgcgagggccaggaaggcgcgacatctcccgggctggacggttgcgccaacagcgcctcggatgacttctgaaagcactggccacccgtgtcatatcttgcagcagcgcgtttatagctgactcgtttcgccctctataaatttggcctcacttcgctgcaactggcgaagtagtcctctactcaatagaaggaaacatccatgctaagcgctatcaatcacacactgggcagctttcaataccctccactgcagcaggatgatgcagagccccagcgcaggaagcgcagcattgacgtcacacactcgcaactgagcgccgccgatcctgagagcacggcagccaacgaccgtcgcaaaagcggaggtgggctagacactctgggtcaaggcaggttgctctaacccgccttaatacgaagggcagtgcacggcccttcgtactgttgtttaacaaaaccatgacattcactgggctaaccttgccggttaaacccagcgtggaacccttacctgcatgccgcacctcgacacactgcccgccctattggccggcccactgctgcgccgcctcgaaccccggcgcctggtgttgtggctggtgggaagtcgagccctggaactgaccctgcagttgcatctacccgcccaaaccctggagatcaaccttgatcattgcaaggtcgtatcggttgggcaccatgcttttatccacttgatcgatgtgccattggacgaggccctgcccctggacgtcgcgatcggttacgacgtgttgttcgacaacaccggcatcgccgagtgggcaccccacctgctgtacgccaacacccactacccaagttttgttttgcacagccgtattcatcagttggtacacggctcatgccgcaaaccccaccacagcgccgatgaaggcctgctgtgtgtcgatcgcctgctggccaacgcctccactcccgccgaccgcccggccctgctgatgatgagcggcgaccaggtgtacgccgacgatgtggccgggccgatgttgcgcgcaatacatgcattgatcacacgcctgggcctgttcgatgaatacctggagggcgccgtgatcgacgacagcgcaagcctctacgggcatcgtgccagttactaccatcgtgccgacctgctgcccgcactggacagcaacgaaaccctgcgtgaacgcttctttggcggtgtgaaaaagccgatcttcaccagcagcactgccgacaatcacctggtcaccttcgctgaagtcattgcgatgtacttgctggtatggtcgccgacgccctgggaactgatcgcgcctgaagcgccgcaactgagcacagaagaactgcagcgctacgcccgcgaacaggtgcagctcgatcgattccgcgagggcctgccaggtgtcgcccgggtgtttgcccacctgtccaccttgatgatctttgacgaccacgacatcaccgacgattggaacctcagcgcccaatgggaagccaccgcctacggccacccgttctctaaacgcatcatcggcaacgctttgctggcctacctgctgtgccagggctggggcaatcagccggatgcgttcagcaagctggtcagccaaacccaggcgcttacctgccagccacaggccaatcacctggatgccgccgcccaggatgaattgatcgacgcgctgctcaagttccagcaatggcactacgtactacccaccaccccagccctggtggtactcgacacccgcacccgccgttggcgcagcgagttcaccctcaagcaaccgtccggcctgctcgactgggaggcgttgagtgagctgcaacaggagctgctcgaccatccctcggccattatcgtgtcacccgcccccatctttggcgtgaagttgatcgaaacagtccagaaaattttcagctggtgcgggcacccgttgctggtggatgcggaaaactggatggcccatcgtggcgctgcccaggtgatcctcaatatcttccgccactcgcgtacgccgggtaactacgtgatcctttcaggtgacgttcactattcgttcgtctacgaagtgctgatccgccatcgcaacgccggcccaaggatctggcagatcaccagcagcggcatcaagaacgagttccccccacgcctgctggaatggttcgaccgcctcaaccgttggctctactccccccgctcgcccctcaacgggttcacacgccgtcgcagcatgaaggtggtgccgcatattccagaggacgccgaagcgggcgagcggttatggaattcagcggggatcggccaggtgtttttcaacgatcagggccagcctgaagcgatctaccagcacaacgcggatgggcgggtgcggacaaggatgacagcgccgaagtaacttttcccacagacataaaaaacacgttcacgccagtcttgtagaaagatcacaagtgactgtttaaatcgcacggatcatttttacgctggtgggctgtgacattgtgctgctgcatggcttcatcaaaaaaagccaaaaaacacctgtggtagaactggacaccgcccggcgtcgtaaacgcaagctatgaggcacaacctatgaacaagcatattggctccaacttcgacgactttcttaacgacgatgggctcattgaggaagtgtcagcaggggcgttgaaacgtgtcatcgcctggcagttggcagaagccattaaagcccagaaaatcagcaaaaaagcgctggccgagcgtatgcacaccagccgtaccgcagtagaccgggcgctcgatcagaacgatgcaggcatgacattggcaaccctggcaagtgcggcaagggctctaggccaacgggtagaagttcggctcatacctgactcggatgcaatactgccgattacctgaagcggcatgccagacgctcaccgggaagccggactcttcagagacagccatagccattagccatcaacctttcgccgtacatctgccctattcaaagcgtccaagccccgttgtacagtagcgccagccacggagtatcggcgtcaacaacggcaggctttgcaggcctgcccacgcaaggaacgcgcagatgggcgatacctccgacaacaacccgttggaacaggacttctctcacttcaacgccgacatgctgcacaccgtgctggagttggtcagcgacgggatctgggactggaacgccaacaccgggttcgtctaccgcaacccaggctggtacgaaatgctgggttatccccgccacgcgctggagaacagtgtattcacctgggaaagcgtgattcacccggacgactatgcccaagtgatgaagttgtttgacgactacatccaccgtcgcgcccctcactaccaagccgaataccgctgtcgcaaaaaagatggcagctacctgtggatcgaagaccgtggctatgtgattgcgcgtaacgcagacggctcggtcgcacggatggtgggcgcccaccgcgacattcatctgcgaaaatgctccgtcgagcagttggagcaacgcaatcaatcccttgaggcactggtggccgagcgcacacgcgagctgtcgcgggtcaaccagcagttgcagctacagctggatgaaaaccgctcgctggccgaacgggatgccctgaccctggtcgccaaccgctaccgcctggagaaagtgctgctggaagaatgcgaccgcgcccaacgctttcgcctgccgctgacgctgatcgcgatggatatcgatgacttcaagccgatcaatgaccgttttggtcatggcgtgggcgatcagacgctggtgcaggtggttgaatgtctgcaacgctgtattcgcccaggtgatctgttggcccgatggggcggcgacgagtttgtgctggtcctgcccaagacctcgctggaaagcgcgaaggcactggcaaatagcatccgccagcaattgagcaacagtccgcacagccacgacttcagcgtcaccttgagcctgggtgtagccgaacgcgagcgggatgaatcccccgccgccctgatagcgcgtgccgaccaggcgctgtaccgcgccaaggcggcggggaaggatggggtctctgaataacagcccccgtgttaccgaaccggcggcgcgtactggatgccgccgttgttccacagcgcgttgagcccgcgcttgatcttcagcacgctgccctggccgatattgcgctcgaacacttcgccgtagttgcccacctgcttgacgatctgcaccacccaatccttgcgcagcttgaggtccttgccgtattcgccatcagcgccgagcaaccgcgcgacatccgggttcttggtggtcttggcctgctcttcgacgttctgcgaagtgatgcccatttcctcggcattgagcatggcgaacaaggtccacttgacgatgctgaaccactcgtcatcgcctttacgcaccaacggccccaacggttccttggaaatcacttccggcagcaccacgaactcgtccgggtgggccatcttgatgcgctgggcatacaggcccgactggtcggtggtcagcacgtcgcaacgcccggcttccaggcccttggcgctttcgtcggcggtgtcgaaggtgatcggcgtgtacttcatgccgtgggtgcggaagtaatccgatacgttcagctcggtggtggtgccggcctggatacacacggtcgcgccgtccagttgcttggcgccggtaacgcccagtttgttgttcaccagaaagccgatgccgtcgtagtaggtcacgccggtgaacaccaggcccatgcccgaatcgcgggagctggtccaggtggtgttgcgcgagatcaagtcgatttcaccggattgcagcgcggtgaagcgttccttggcggtcaactgggtgaacttcactttcgatgcatcgccgaacaccgccgccgccactgcgtggcacacgtctacatcgatgccggtcatcttgcccgtgctgtccggcacgccgaaacccggcagcccgtcgctgacgccacactggatgaagccttttttctggatagcgtccagggttacgcccgcataggcgctgctcaccagacccaatgcagcggtggtgccgatcacggccaaggtggttttgaatgggttcatgcaaggctctccctgtcattccttattattcgacgccccacagcccgcgccggtttatagtgctgccgggcagtatcaacggcttcgcaccgctgccacaaacgacctttaggcaaaggctccttccgatttggaatgaagtgcatgatttcaaaacgcttgaccccttcgatgaccgccctgcaatgcttcgaagccgccgcccgccacttgagcttcacccgcgccgccgaggagctgcacctgacccagagtgcggtgagcaaacaagtggcgcagttggaggagatgctctgccacaacttgttcgaccgggtgcgccagcgtttgtacctgtcaccggccgggtcgctgtacctggccgaagtgcacaagatcctcacacaggtggacatctccagccgttacatcctcacctacggcggcgaaaccgaagtgctgcgcatcgccacccagccgaccttcggcgaccgttggctggtgcccaagctcaaggattttgcggcgcaacatccgaacatccacctggatgtgcgcaacgagctggagccgttcgatgtgctacaagccaaggcggatatcgcgtttttcttcggccagggttcatggccgggagcaacctgcatcgagctgttccgtgaggcggtggtgccggtgtgtgcgccgggttttgtcgccgaaggcagtgatgcttcgtcgcgccacaccctgctgcaatgcacctcgcgcccggaggcctggcatgaatggttcctggagcagggcctgcactcacagaacagctaccacgggccacgattcgacacgttctacatgtgcattcgcgcggcgcaatcgggctatggcgtagccttggtgccgcagtacctggtggccgaagaactggcccagggcagcctgatgattccatgggactatgcgatgcccagcagcggcgcacactttatcgcccatgccgaacatgccggcgagatccccaaggtgaaggccttcctgagctggatggtcgactatgtgagcgcacatcgcgattttcagtcatgacccggcgactttatttcgtttgcgacaagggtgggcgcccggcttagataaaaagacgcccgtcactgtcgagtctgcgattcatgagccacgaaaccatcagccagtcgatttccatcgttcaccccatcagcctcaaccacggtaaaaatgccgaggtctgggacaccacgggcaaacgctacatcgattttgtcggcggcatcggtgtgctcaacctcggtcattgccacccgggcgtggtcgaggcgattcgtgaccaagccacccagctgacccattacgcgttcaacgccgcgccgcacgcgccctacatcgaactgatggcgcggctgacggcatttatcccggtgacctacccggtcagcggcatgctcaccaacagcggcgcggaagcggcggaaaacgccctgaagatcgtgcgcggcgccactggccgcacggcagtgatcgcctttgacggcgccttccacggccgcaccctggccacactcaaccttaacggcaaggtagcgccttacaaacagaaggtcggtttgctgccgggaccggtgtatcacctgccctacccgagtgccgacaatggcgtgacttgcgccgaagcgttgaaggccatggagcgcctgttcagcgtggaaatcgacgtcaacgatgtggcctgtttcatcatcgaaccggtacagggcgaaggcgggtttctcgcactggatcgcgaatttgcccaggcgctgcgacgcttttgcgatgaacacgacatcctgctgattgccgatgaaatccagtcgggctttggccgtaccgggcagcgcttcgcgttctcgcgcctgggcatcgaaccggacttgatcctgctcggcaaaagcatcgccggtggagtgccgctgggcgccgtggtcgggcgcaaggcgctgatggacaacctgcccaaaggcggtttgggtgggacctattccggcaaccccatcgcgtgtgcggcggccttggccacgctggacgcgatgaccgacgaacacctggagacctggggcgcacagcagcaacacgccatcgtcagccgctatgaaagctggcgcgcgcaaggcctgccgtacctggggcgcttgaccggtgtcggcgccatgcgcggcatcgagctggcaaacgccgacggcacacccgcaccgcaacagctcgctcaactattaagcctggcgcgggacgccgggttgttgctgatgcccagcggtaagtcgcggcacatcatccgtttgcttgcgccgctgaccatcgagcctgcggtgctggaggaaggcctggatatcctcgaggcctgcctcaagcagttgggctagtaacgcgcatccacgggtctgccgccgctcggccagtccttgaccttgtcggggaagtccgggcgcggttgacccgagaaatacgccgccacgtccaccgcttcctggtctgacaaaccgccctgccccagcgggaatttctcgtgaaagccgatcggcatgttgcgtttgacgaacgctgccgccgtgtaggtgcgcgccatgccggcgccgatgttgaacgattgctcgccccacagcggcgggtagatcagctcgccatcagcgcgtgccaggccctggccgttgtcgccatggcacaccgcgcactgtttggcgtacacctgcttgccattggccaggtccggcttgagcgccgggtcgaccttgcctacgccgcgcccggcgactttgtcttcgggacgggtgttgtttttcatccagtcgaagtacgcaaccatcgcctgcatatccgccgattgcggcggcagtggcgtgccattcatcgagcggcggaaacagccgttgatgcgctcttccagggtcaccaccttgcccgcacgcggcgcatagctggggaaaaacgccgagacgcccacgaacggcgaaccatccgccaccgtgccggcattgaggtggcaactggtgcagttgagcgagtttccgacattggcgggcaacagcgctttggtttgcaggtgcaggcgcatgccacgaatgacttggtcggcattcggggcagcgagcagattggccagtcgcggggtttcaaacgccgatgagtccgtggtggccgggttgagttggtcacgcagttttttcacttgggcagcgctgatcggcgtgccttcgttgccccaacgggtgcgcacgaatgtcaggatttcggcgatttcctgatctttcaaacgggcgaaacccggcatggtgtagacccgtgggtgcgtcgccgtctgtgcggtctcccaaccggtgagggtgatgtgcagcagtgaagtcgggttgctggacgcgatgctcgggttgcccgccagggatgggaacaggcctttcacgcccgcgccatcgctgcggtggcagtcgctgcagaactgcatgtaacccaggccaccgcggctggtgaacaagtccgccgggggcgcggcgggcgccacggccacagccggcatgggcaggtcgtccttgccgggcggcagggacttcaggtaacgggcgatggccgtcaggtcgtcgtcactgaagtgctgggtgctgtggtgaatcacatcagccatgttgccggagaccgtggcaaagcggttctgcccggtcttgagcagttgcacggtgtcttccacggtccacaggttgcgcaggctcaaggcgcgccaatgctcgactgtttcaccggccaggtaatgctggccactgcgccccgcgtcgctcatggctttttcctggaaggcaatgccccgtggggtgtggcaggagccgcagtggcccaggccctggaccaggtaggcgccacggttgagctgttcatctcgcgccggatcggccaggaagggctgtttatcgagaaaggcgaaattccacagcgccaggccccagcgctggttgaacggaaagcccatgtccgcctcaagattggcctgctgcaccggctcgacgccttgcatcaggtagacgtacagggcgcgcatgtcggtttcgctcatcttggcgtaggacggatacggcatcgccgggtacaggttcatgcccgtcggcgttacgccttcgcgcatgacgcggtcgaactgttcgaaggtgtagccgccaatgcccgtctcgcggtccggcgtgatgttgctcgaaaagatcgtgcccatcggcgtgctcaactccaggccgccggccatgaccttgccttgcttggcggtgtggcaggcaatgcagtcacccaattgcgcgacgtatttgccgtgttcgatcagaggcgtgtcgggggtgttggcgtgcaggggaaaagacaagcagagcgtcgcccccagcaaggccaggcgggagagggaaagcgccatcgtattagtcctttgacaacctggcgtggggcggtcccctgggcgcaggtgtgtggtcgtttttatgggttcatcaggcctctgtgttgtaaaggatatgcgggcgaaggatgttgatatgggtcagggcgaaatcgatggcaacgacaggtacttgaccgttgataagttgccctttgaagccccgtgcacaattctgtaggtttcagccatcgaacgaggagaccaccatggagaccgtcacctacgccaacgcccgcgcccatctttccgaaacgatggatcgggtcaacgaagatcgcatcccactgctggtaacccggaaaaaaggcgagcctgtggtgatgatttcgttgtcagagttcaacgcgcttgaagagacaggctatctgctgcgctcgccagaaaatgccaaacgcctcatcagctcagccaacagcctgcgggcccgcaaagccaaagtagttgattgaataatgaaaatactcgcttcccctgagggcagaggcgactactgaatgaatttacccgcaggaacccaccttgacctgacctccctcccccctgaaaatgcccgacgcttttttgtcctcgtttactgaagtagtgaaatttcaatgtccgattcttacaccgaacactccgccaccgaagaatccgtcgtcgccttgcacgccaaagccgaatacgaaaacgccatcaatctttcacagcatctgcctgcggccaagatcatcagcgagatggtgctggacgctttccacacctccaaggaaagcgaccagatccgcgaactgcgcgtggccatccgtcaggcccacgatgccttcgacgacgacaaggcctacgacctgatgggtcagctcaagcagctcaaggatgccgaggccgccgacaacgctgccctggaaaacttgagcagccagttctccatcagccgcatactgtccagcttcaaggacgaccccgagttccaggagctggtctacggcctggcgcttaaagtgctgaaccagagccaccaggccatcagcaacccgagcgccggcaagagcaaggcatcccgcccgaagaaagaagccgaagtgtttgtgatcagcaaggatggcatcagcgtcaccctgccgctgcgcacgccgcgttcgaagcttaacgttgaccgtgaggcgttcgagttcctgggcttcagctttgtgggtgaaggcgatgaagcggagctggaagtcgagagctttgtggataacaccggcgccgagcagcctttgagccgcaagagtgtgattactgcgttgcagcagcagacggcgtttgatgggtacagcatcgcgcagcagtaacccttaatcccagccctttcaaggtctttaggtagaacaggcgaaaagtactctgtggcgagcgggcttgtcccgcgttgggctgcgcagcagccctgaaacccgcggccgaagaatgcctgtctcagcgcattcctccttcaagggtcgcttcgcaacccaacgcgggacaagcccgctcgccacagttgcagtgttcgtcctcagccagatagggtcggtttttcaaagaccttgaaagggatgagccttaatccgcaacactactgggtaccgctcccacgtttgatcggcgtcgcgtcaactgacctgctgcgcaaacacctcgcgaaaccgcgccatatcctgcttgtctcccaccgtcacccgtacccactgcggccagcttttaaacatccggccgatcagcacaccgtgtgccgccagcttctcgatcacctgctccgccggctgtttcacgtcgatcatgaagcagttggcctgtgacgccgtgcaggtgaaaccacgccccttcaaccaagccacagtttcatcacgcagttggctgttcagtgccttgcgttgcggcagcagtttcacgtcttgcaggctggcaaggccacccagcaacgtgctgcctgccggcacgttgtcaccgccaaacacggccagccgctccagcagcgccggatgaccgattgccaggcccaggcgcgcaccggccatgccgtagattttcgagaaggtgcgcagcaccagcaggtcgtcgtggtccttgacccaactgaccacgctgggaacatcggcaaagtcgatataggcctcgtccaccaccagcacgctgcctttgggtttgtttgccaaggcctggcggatggcatcagtgggcgtgacagtgcctgtagggttgttggggttgcacagatagagcatgccagcctggggatcggcggcgagcatggccgggatgtcgtgggcgtggtcggcgttgaggctgacttccttcaccgaggccctgttcgactcagcggcctggcgtggcacttcataggatggcgtggccatcaccagaccgcgggtttcactggtgaatgccagcactgcatagcgcagagcagccatggagccggcaaataccgccacctgttcttcgacaatgccctgttgctgggcaaacagcccggccagggcgtacatgtgtttgtaggggtaacgcccggacgttgcgattcccttgtgcatggcttcgcgggcagcccgtgagggcccgtaggggctttcgttatagttgagcagcaccttgtcaggcttggtcggcggcgggctggcaaccgcccaatcgaggcgtcccagcagaggcagggcggcgcccagggcgagaagggaccgacgacttacgctgaccatagggctactccttgtaggcgggtgatggattcgcacagcacgtactgaggggtatgacgataaacgcagccggggatttaaaccccgtccaagaaaaagccccgcgcttctctcgaaggcggggctttttcactgcgggaccactcagtgagcgtaggtcagcagcagctctttcggtacttggaaatccagggacatcatcacgctcagcgcggtgatggtgaagatcgagaacacgaacagcttgcgtgcccagacggtgtcatccaccgccttgtagccggtccaggccatgtacaaccagtacatgcccatggcggcagcgacggcgaggtagctcatgccggcgtagccactgaaggtcaacatcaaggtcgccacgaggaaggccaggatgtacagcaggatgtgtttcttggcgacctggataccacgctttaccggcaataccggaatcgacgcagccaggtagtcattgaagcggaaaatcgcgatggcgtaggaatgcggcatctgccacaggctgaacatcaccagtagcgtcagcgcggccatgtcgaagctattggttacagccacataaccaatcaccggcggcatcgcccccgacagactgcccaccagcgtgccgtgaaccgacttgcgcttgaggtacaggctgtagaggccgacgtagatgacaaaaccgatcacggcaaacagcgccgccagcgggttggccaccttgtacaacaacgccacaccggcaacacccaggacggtcgcgtagatcagtgccagtttcagggagatgaggccctggaccagcacgcgattcttggtgcgctccatcttgatatcgatgtcacggtcgatgcagttgttgaacacacatccggaagctaccaccagggacgtaccgatcattgcagccaggaagatggccagatcgacatgtcccttggaggccaggaagaaaccgcccgccacagaaagcacgttaccgaaaatgatccccggtttggtgatttggataaagtgcttaagcgacatcgggtcttacctcacttcgccatcatgaacgtatggatgctgaacatgatccatatcgacaggccaaccagcagtacgattacgatccctgcgaacacgaacgcaaccacgttgtcgcgctgctccttggaacggtccaggtgcaggaagtacaccaggtgcaccagaacctgaatcaccgcgaatgccagcacgatcatcaaggtgatcgacttcggcagggtcgggtacatcaccagaccgaacgggatgagcgtcaggattaccgacaggatgaagccgatggcgtacgacttgacgctgccgtggcttgcatcatggctgtcatggtcatgggagtgtgcattagccattacagagtccccatcaggtaaacaacggtgaagacgcagatccagaccacgtccaggaagtgccagaacaggctcaggcaggtcaggcgagtcttgttggtgttggtcaggccgtgcttattgacctgatacatcatcaccgccatccacagcaggccggcagacacgtgcagaccgtgggtgcctaccagcgtgaagaacgcggacaggaagccggaacggtgcgggccgtagccttcggagatcagcaggtggaactcgttgatctccatgccgatgaagcccaggccgaacaggaaggtcagggccaaccagctcagtacgcctttcttgttgcccttgtagaaggccaacatggcgaagccgtaggtgatcgaactgaacaacagcaaggcggtttcgccgagcacgtaaggcagttcgaagatgtcgtggcccgacgggccacccgctacgttgtttaccagtaccgcgtacaccgcgaagatcgacgcaaacaagatgcagtcggtcatcaggtagagccagaaaccgaaaacggtcatcggccccgagtcgtggtgatggtcatcgtgcccatggtcatcgacatgggcgtgtccagcattggtcactaagttcgacatggtttaagcctgttccaacgaggtttcaacacggttggccgggatcttcttctcggctaccaggcgagcgtgctgctcggcttcgatgcgctcgatcgtctcgaccggcaccatgtagccttgatcatcacgggcagcgtgaatgatgaagtaaccgatagtgcccaccaggctcacgattgccagccaccagatgtgccagatcatcgcgaaaccgaacacggtcaacagcgcgcccatcaccacgccagtggcggtgttgtttggcatgtggatcggttcatagtgcttcggacgctggtacgcagtaccgtcttccttggcttcggtgaacgcatcaatggtgttcgcggtagggatcacggcgaagttgtagaacggcggtggcgacgaagtcgaccattccagggtgtggccattccatgggtcgccggattcgcaagcgttctgcttacggtcacggatactcacgtacagctggatcagctggcaggcgatacccacagcgatcatcaccgcaccgaacatggcgacgtacaggtacggcacccactcagggttggtagtggcgttcagacgacgggtcatgcccatgaagcccagagcatagagcggcatgaacgcgacgaagaagcccgagatccagaaccagaatgcagccttgccccaaccttcgtgcagcttgaagccgaacgctttcgggaagtagaaactgaaaccagcgatgtaaccgaataccgcaccaccgatgatcacgttgtggaagtgagcgatcacgaacaggctgttgtgcaggacgaagtcagcacccgggatggccagcagtacgccggtcatgccgccgatggcgaaggtcaccatgaagcccagggtccacagaacctggctggtgatacgcagacggccatggtagatggtgaacagccagttgaatagcttcacccccgtcgggatggaaatcagcatcgtcgccagaccgaagaaggcgttgacgctggcacccgaacccatggtgaagaagtggtgcagccaaaccatgaagcccagtacagagatcgcgcccgatgcgtagaccatcgagtggtgaccgaacaggcgcttgccggtaaaggtcgagatcacttcagagaagataccgaacgctggcaggatcaggatgtacacctcagggtgaccccatgcccagaacaggttcacgtacatcattggattgccaccaagttcgttggtgaaaatgtggaaatccaggtaacggtcaagcgacagcagcgccatggtagcggccaggatcgggaacgaagccacgatcaggacgttggcccaggtgcaggtccaggtgaagatcggcatgtccatcagtttcatgccaggggcgcgcattttcaggacggtggccaggaagttgacccccgtcaatgtcgtcccgagccctgataactgtagcgcccagatgtagtagtccacacccacgccagggctgtactggatacccgacaatggcggatacgcaacccaaccggtcttggcgaattcgccgacgcccagggatacgttgatcagtacaacaccggaaaccagcagccagaagctcagggagttcaggaacgggtaggcaacgtcacgggcaccgatctgcagcggcaaggcaaggttcatcaggccggtgaagaatggcatcgccatgaagatgatcatgatcacaccgtgggcggtgaagatctggtcatagtgttcaggtggcaggtagccaggcgaaccctcggtggccatggccaactgggtacgcatcatgatggcgtcggcaaaaccacgcagcagcatgaccatggcaacgatgacgtacatgacaccgattttcttgtggtcgacggacgtcagccactcggtccacaggtaggtccacttcttgaaataagtgattgctgcaaacagtgccagaccacccagcgcgatcatggcgatggtcaccatcacgatcggctcgtggaacgggaccgcatcccaacttaatttaccaaacatcgtttactcctctgccccagcagttgaatgcgagcccgtgtcagaaccttcaaccacggccacttctttcttctcgtgcttgaccggcttgcctggcttcataccttcgtacttgtcgacgattttctgaaacaggttcggctcatacgtggagtacagggcgactgggttgttctggcttggtttggtcagggcatcgtattcagcttgatcaagctgtttaggtgcggccttgacttcggctacccaggcgttgaaatcttcctggctcgtcgagatcgctttgaatttcatgccggtgaagccagcgccgctgtagttcgcggagatgccttccatttcagctttttcgttggcgatcaggtgcaggcgggtctgcatgcctgccatcgcgtagatctggccacccagggctgggatgaagaacgagttcatcacggcgtcggaggtgatccggaaattgagcggggtgtgctcggggaacttgatctcgttgaccgtggcgatacccaggtccgggtagatgaacagccacttccagtccagcgcgaccacttcgatgttgatcggcttgacgtcggactccagcggacggtacgggtccagctcgtgggtcgacttataggtgatgtaacccagggcgatgatgatgaggatcgggaccagccacaccgcgatttcgatcttggtggagtgcgaccacttcggcgcgtaggtcgcgctggtgttcgacgcgcggtatttccaggcgaaggcgaaggtcatgatgatcacagggaccacgaccagcagcatcagcagggtggcggtgatgatcaggtttcgttgatccagaccgatctgtcctttcgggtccatcaaggtccacttgcagcctcccagcattaacatcatgccaagcagcggcaaaaagcctagtaatcgggggtacctgtttttactcatctcacgacctctaaagcagcttgcgcaatgcagttgggttttgatcgccaacacttcaccctgccaagggttggcatttctcttcgattgaataagagcctgcccatcacgtcataagggaacgtttcacggacctgcggtgagttcttattcgatttcgtggttaaaggccttgttacagaccaattccatttggtgcggatagttgaaaggctgccggaaccttggggtcgcacagagccatccatctgcccttcgaccgctccggtgctcaaatattgaacagcaccggacattcagtgcgggcgattgtagttagctagcgatgtataaaccatgtcttataaagaaataatttttatcgattacagcaataatccttcaccattattgcaacggttcgcgatcttatcgcgttcgattctcaacaaaaaccacaaaaaatgccgtgttatagggcagcctgccgcaccccttaccgcgtgtaaggggctgccaaaccgatgcaaccccccataaaacaaggcattcggacatcaccgaatccctggcgcggcgcgaggtgcgcggccttcccggcgccccgaactgacagcacatcttggcggttttatgcaaatttaagcgggggtttggcgggtcagaaacgtcctgcggcggcttccgtgtgacaacatgtcgcacaccgcgcgcagccaaaattgtccggcgtcacgttccgttcacaaatccccacacgcaaaaacgccccggccttcatgaataagcgccggggcgtttgagtgaatgattcaggctttgcgctggcgattgcgatagatgcccagcggcaccaggatcacggtcagcacgaaggccaccaatgcccattgcgccagggaaagccccagtacgggtgggtacggtgtgctgcagaagccatcgacctggaagcccagagggaacaccttggccagcggcaggtcatcgacgatcggttgcagcacatcgatgccgcagctgacctgggggaaaaactgggtgtacacgtgatgaccggcggcagcgacaccgccaagggcgctgagcaccaccaggccctcgaacagcgtgatcgcaccttttttacgcatggccgcgccgatgaacgcgaagatcgcgatcaacagcaaggcatagcgctgcaggatgcacaacgggcatggcgcctcgccgagtaccacctgcatgtacaacgcaccgccgatcagcgccaggcagatgatgcccagcaacaccagaaagcgccgctccctgcctaaacgcaattcgtcactcatccccgtatccctttgtttggttgtgccaatggccgcaagtttacacacaggccaccgtttaaacagaggggggttaacagcggattaatccagagaaatagaccgctgtatgtgggagggggcttgcccccgatagcagtggatcagccagcttatgtgcaaccgacctaccgctatcgggggcaagccccctcccacacctttgaccgccttattccagggcagcagccgggccaaagaattcgtagcggctttgctgctcgggtacacccagggccttgaggtggcgcttgatcgcggccatgaagcccttaggcccgaggaagtaggcgtccaggtcgcgctgctcgggcagccaggcggccagttgttcctggctgagcaagcccaccttgtccgccgccgggcttacgccatcgtcttcggtgtagcagtagaagcgcttgagctgcgggtgcttcgccgccagggcgtccacccagtcacggaacgcatggacgccgccgttacgtgcgcagtggatgaagtgcaccgggcgctcggtggccagcgcggcttcgagcatcggcagggtgggcgtgatcccgaccccgccgctgatcagcaccagcggtttgtcgctgaccgccagggtgaactcgcccgacggggtgaacaggtcgatggtcgcaccgacatgcagctggtcgtgcaggtagttggacacccggccaccggcttcgcgcttgacgctgatgcgatacataccgctatcggtcaacgccgacagggagtagttgcggcgcacttcctcaccgtcgagcaccagcttcatgccgatgtactggcccggcgcagcggcgaggatcggaccgttgtccacaggagcgaaatagaaggagatgatctcgtcgctctcgaccacgcgcttgaccacaataaacggccgcgccccacgccagccaccgggcgcctgggccttctcgtcgtagatcaccgcttcagcgccgatcaggatatccgccaattggccgtaggccgcaccccaggcactcatgacctcaggggtcgcaatctcactgcccagcacttcggaaatcgcccgcaacaggcaggcaccgacgatcgggtaatgctccggcaggatctgcagggccacgtgcttgttgatgatcttggctaccaggtcgcccaactggtcgagctgatcaatgtgtcgcgcatacatcaacacgccattggccagggcacggggctggtcaccgctggcctggtgggcctggttgaacagcgggcgaacttccgggtactcggacagcatcatgcggtagaaatgggtgatcagcgcttcaccgccgctttccagcaggggcacggtggatttgacgatggcacggtcttgggcactaagcatgggagcctcctgggcttctttactgattgcctttacctactcagtattcgtgccaactaataaaccgttaattttcaataacttaattaatgtgtagtcagtatgacttcctacaccttatagtcattaggactacaaggagtcattatgactgcgcaatcgctgctcaccaccctgctgcccctggtcgccgacctgtcccgcgaactgcccgaaggcgagcgttaccgccgcctgctgcaagccatgcgcgccctgctgccctgcgatgccgccgcgctgttgcgcctggacggcgagtggctggtgccgctggcggtggacgggttgagcgccgacaccctgggtcgacgcttcaaggtcagcgagcacccgcgctttgccgtgctgctcagcagccccggccccacgcgctttgacagcgacagcgaattacccgacccctacgacggcctggtcgagggtctgcacgggcacctggaagtacacgattgcatgggttgcccgctgttcgtcgacgaccagccctggggcctgctgaccctggacgccctcgacaccgagcgtttcgaacgcgtggaactggacgccctgcaggcgttcgccagtctcgccgccgccaccgtgaacgtcgccgaacgcatcgaacgcctgaccctgcgcgccgaaatctaccgcgaggccagcggccagcagcacaaggaaatgatcggccagagcaaaccccacaaacgcctggtggaagagatcaagctggtgggcggcagtgacctcaccgtgctgatcaccggtgaaaccggcgtgggcaaagaactggtggcccaggccatccacgccgcttcgccccgcgccgacaaaccgctgatcagcctcaactgcgccgccctgccggaaaccctggtggagagcgagttgttcggccacgtacgcggcgcctttaccggcgcgttgaacgaacgtcgcggcaagttcgaactggccaacggcggcacactgttcctggatgaagtgggcgaactgtcactgaccgtacaggccaagctgctgcgcgtattgcaaagcggccagctgcagcgcctgggctcggacaaggaacaccaggtggacgtgcgcctgatcgccgccaccaaccgcgacctcgccgacgaggtgcgcaacggccgctaccgcgccgacttctaccaccgcctcagtgtgtacccgctgcaggtcccggcgctgcgtgagcgcggacgcgatgtgttgctgctggccggtttcttcctggagcagaaccgctcgcgcatgggcctgggcagcctgcgcctgaccagcgatgcccaggcggcactgttggcctataactggccgggcaatgtgcgggagctggaacatttgatcggacgcagcgcgctgaaagcactgggtaactgtcgcgagcgtccgaagattctcagcctgaatgcacaggacctggacctgcccgatgtcagcgcagcgctggtcgaagaacccgccgaggcggtcgccctggtgaccggcgacctgcgccaggccaccgagcagtatcagcgccaggtcatcagcgcctgcctggagcgccaccagcacaactgggccagcgccgcccgcgaactgggtctggaccgcgccaacctcgggcggatggccaagcgcctgggcctcaaataacccaggcaactggttcacatgtgggagggggcttgcccccgatggaggtgtgtcagccagcccatctagcattgacccactgccatcgggggcaagccccctcccacactagacctgcttcgcctgaaaaaccgggctcgctggcttgggcttacgaaagaccaacacattgcccagcatcaccagcaccaaccccgccaacgccggcgcggtccactgatacccctcggcaaacgccgacacattcagcgccaccaccgggaacagcacggtgcaataggccgcacgctccggccccatgcgcccgaccagcgtcaggtacgcggtaaagccgatcaccgaacctggaatcaccaggtaccccagcgcgccgatataccgcgcgctccagtccatctcgaagggaatcccgcgcaccgcgcagtaagccgccagcatcgccgatccataggccatcccccaggcattggtggtcagcggcttgagcccggccttctgctgcaggctggacagcatattgccggccgagaagcacatcgtccccagcaacgccaagcccaggccaagcaaagtctgcgggctggcggtgtgccctaccagctccggccagaacagcaggcccaaccccgccaggcccaggccgccgcccatcaacacattgcgcgccacccgctggccaaaaaacatccgggcgttcagcgcgttccacagcgtggccgtggaaaacaccaccgccaccaacccgctggggatccattggctggccgtgaggaagcacatgaagttcacgcaaaacaggcacagcccctgggccagacagatcaggtgcccgcgccggttcatcacctgcaacctgcggctcaccagcaacagtgcaaacaacaccagtgctgccaggccgaagcgatagacgatggacacaggaatcgccaccacgcccaactgccatttgagggcgatccaggtggtgccccagatcagcacggtgagtaaatacaggaaaagattcatagcgggctccatcggttgagccacagtgtggcccccagcctgggatgcgctcttgcacaatcttgcgcttttgtcggccaatgggatcacagcaaccagcgcgcggagtaggatgcaaggcgtcagagagtacgaaccatgccagacctggaatccctgcaagtcttccaagcgcttaaccgctcgcccaacgcacgcctcgaagcctgcgccgagctcggtgacggcttgtctgcagcgctatggagcaaccatcacgacgcgcaggactaccaggcccccagccatcacacgttgtcctgctacatcggcggcggcaccggcacctttcgacgcgaccaacccggcaccaagggcggccccgacaaactgtgcatcctgcccgccgaacaccagtcggcctgggtgatcaacggcgaaatccgcctggcccatgtgtatttcagcccggagcaattcgcactcggttgcgtcaccctgctcgaccgcgaaccgcgcgccctgcaattgcgcgaaagcacctttctggaggacgccggccaggcgcgacgctttcatcagttgatagcgctgaactggcacgaacccgccgagcgcctgctgactagcagcctggcccatgaaatgctcagccacacgctgctcagccaagtgggcgcacgcgacgggctgcgccttaaaggcgggctggcggcgtaccagcggcggctgttggtggagtacatcgaccagcacctggaagacccgatcagcctaggccaactggccggcctgtgcgcactctcggaataccatttcgcgcggatgttccgccaaagcttcggcctgccgccccatcagtacctgctggcgcgccgcctgacccgcgcccaggcgctgctgcgcagcggcgcgctgcccttgagtgaagtcgcgttgatctgcggtttctccagcgccagccacttcacccatcgcttccgccaggccatgggcgccacgcccggcgaataccgccaagccttctacgcctaggtcatcaaccccagggtcttggccttggccactgcttgcgtacgccgttccacccccagcttgctgtggatgcgccgcgcatgggtcttgacggtgtgcagggagataaacaggcggtcggcgatttccaggttggagttgcccagggcgatcaattgcagcacttccagctcgcgctggctcaagggattctctgccgcgcccgacacggccgcctgaggttccatgcccaactcactgagcacccccggcgagcgcaatcgcagttcgcgaatcgcttgctgtacctggcaacgcgccgccagctccagcccggtttgcagcgagcgacgcgccaggaccgagtcgcccatttgccaagccacctcccccagcaccaggtgcagttcggtttccaggcagagcatgccgcgttgatgggttgcctccagcaaagccgtcagccgcgccaccggttgctcggcgcagcccagcttcacttccgccagcaccagcaggtattccaggcgcgggatcagttccagggtggccggcggcgcctgtttggcctggggaccacgaaagtggcgaagcacacgacgcaccgcttccaccgtcaattcggcgcgcccctgctgcaaccagaaatgcccactgaccaacagcaacactgcgcggtacaccgtgtcggggacctggcgctgttgcatcaagcgttcggcctcgcgcagttgcacaaaggcctcggcgtagtcgccacggttggcggccagcagggccaggccgagaaacccgtagagcacgcgcttgtcctggctgtgcaggcacatcttcaaaccggtctcgaagcactcggcggcaaggccgtcctggccttgacgcaacgccaggtgcccacggcgcagggcgatgcgccccaccagcggcccggctttcacacgttgcttgatcaacatcgcctgcacactctccagcaggctctgcgcccgatacggggcgccgcgctgctccagcaactgcgcgtgatccagttcaagcaacgcctcaagcagcaacgacccatgggcgcgggccaggcacaacgcttcgcggctcagcgcctgggctacgtccagttcgccgcgcagcagtgcttgctgagtgaggcccgacaggcacatcagccgcgacgtccaggcgctgtcgggcaaggcttgcagcgcttcgaggaaatgcgcgcgggagcgttcggcatcgccgcccaagtgcagcagccagccccactgtgcctgccagcgcgccagcaggtagcgttgttgcgccgccgtcggttgcggcgcgaaccgtgccaactggtcgatacattgcgcggcctggtcgaagcgcccggcgaacagcaacgccgccgtcaccagccccaccagttgcgccgagccgagcatcaactcttcaccatgctcttcatgcaaacgcagcagcaatacggcgttctgctggcggaacaggtcttcgaaactgaaatgctgcaacaggctgactgccacctcgtactcttcggccagcagcgcgtgctcgaacgcggcctgccagtcctgttcggcggtgaaccactggcaggcacgccgatgccaggaacgcttggccggccaggggtcatcgcgtatcagccgggcaagcggcgggaaaacctgcaaccactcggtatcttcccacggctggataaaggcgccgagcgcctgcaactcgcgcaggtagtgatcaccgtcgccaaagccgaacaagtgctcgcacaatcccgggttaaagcgtggcaggtgggccagcacgcgccaggcttccgtcagctcgggcggcaaggtgctgaagagttcgtgctgcaagtaatcgagcaaggttttctgcgggtggccatcccccagcaacgcaatgcgcacgccggcgcaccaaccggcgctgaattgccacacgctgtccgctgacggccccagcgggagcagttgctggatttcttcaagggtgaacgccaactcggcgcccccctccagcaattcatcgtcgagcaacaggcgcggccagttgcaggctggacggcgccgcgcgcccagccaccaggtcagcgaagggctgctcgccgtgagcaggcgatcgagcaaggcatcggtttcgggggtgggcaagcgacagaaatcatcgaggaacacccatgccgatgttggccagcggccaagatctgccagcagcgtggcttcatcgctgaacgccaagccgaggttttgcgccaggcgccggcaaaggtcgagggggctcagggcgacaccattgagcggcaaccagtacacctggcatcccgctggcgcctgcaacgcacattcggccagcaacgcactcttgccgctgccgccgggggcgcacagcaacttgaccctgaccggcgctgccagcaacggcccggccaggcgtgggcgcaacagatggtgggcggacagccgaggcatgaatccaggacggtccagacagcgtgtcatggcggtcattgctgcatcctgcgttcttattgttatgcaacgtggcgtctaccctagtcctgtggttggtggttgttgaagaagtattcagcggggtgattggcgggcataaaaaagccgggagcccgaagggtcccggccaggtcagagggtgatcagcgcacgccttcggccctcagcgcagccggggtgtaatccgccgccttggccgcaaagccaaacacgaagctgctcttctcctcgttcttcatgcccagcgcgatgtagcgcccggcgatgatgtcgtacagggtttccacggtgtaggccggggtctggtggtcgtagtagaactgcgcatggccttcggcgacccgccacagttggccacggccgtcatagtgatccaccagcgccacctgccagctgtcttcgtcgatgtacatgtggcgcttggcgtagatgtgccgctcactcggcttgaccgtgcccaccacttcccacacgcggtgcaactcatagcgggtcaggtcctggttgatgtgaccggccttgatgatgtcgtcgtacttgagcgttggctggtccagcctgtagctgttgtaagggatgtacatctccttcttgcccaccagcttccagtcgtagcggtccggcgcgccggagaacatgtcgaagttgtccgaagtacgcaggccatcggaggcggtgcccggtccgtcgtacgccacttgcggcgcccggcgcacacgacgctgcccggcgttgtagatccacgccaggcgcggttccttcacctggtcgagggtttcatgcaccagcagcacgttgcccgccaggcgcgctggtgccgtcaccgactgtttgaagaaggtcagtacgttggccgctttggccgggtccatgtcggggatcagttgcggcaccgctacttcttcctcaaagcggatcggcgtgtagctcccattggtctgcggggtggcctgggtgatgatgcggcgcaggttgccgccgtggtaacgggtgatgtggttccacagcacctccacgccattcttgggaatcgggaacgcgtagtagcggttgccggtgaacccttcgaggccgttgccatcgttgatcggcttgacgttcaacgcgctgcgcttgatcgattcatagatctccggcggcaggttgacggtgcggtgggtcgggtacaccgggatcttataggtctcggggtagcgcttgaacatggccacctggccgtcggaaagtttgtccttgtacttgtcgacggtggccgcggtgatcacgaacagcggtttttcactggcgaacgggtcagccaggaagcccttgctgtccacggctccggcgtttttcgggatgcctccagtccaggcagggatcgagccatcggcgttgccggctttctcggcgcccaccggggtcaacgtagtgccgagcttggccgcctcttccggggagaccgcggccatcacgttgacggccaacaggctgagggccattaccgcaattatcttacgcatagagtgttgtccttccttaagccagatcagaagttcgcgccgaagctgagggcgatgaagtcgcggtcggtgagggtgttgtagtcgccgccgaaaaagtcggtgtagctgaggctggcggtataagtgctgcggtaatccgcatccacgccgacgctgatggccttggcgcccttgttgaacaggccgttggggccgtagccggccacgtcatgggaccaggacaggttgggcttgaggttcaccccggcaatcgcgttgttgtagtcgaggatcgcccgcgcgcggtacccccaggagttggccgtgacaaaaccgtcggtgtcaccctggaaaccgtaggcgccatacaccgagtcgcggccataacgcagcttggatttgtcctccaacccgccaacgtgcacgtaggccgcttcgccgaccagggtcaggcgttcagcgcccagtacctggtcgaagaattgggtcatggtgctttggatctgggtgatttccttgcggcggtaacctttgttgtcgtcaccgaagttgctgcggatcggcgaggccagttgcccggcgaccgggttgatcagggccagggtcaggtcggtggtgttgagttgcaccggggcattggggcgatagctgatctcgccggtccacgccgtgccggtgggcaatgtggtggagaaactcgcaccaaacaggcggatatcttccgggtagtccaggtagtactggccacggccaagcatcaggctctggaccagacctgcgccggagccgggcgcgatgccattggctgcaccggcgatcgcaccgagccgggccaggctcgtattgttggtgatggtgcccacggtcggggtgcggctgtggtagttcatgaaatacaagccgtattcggtgtcatcccccaaccaacgcaacgccgtaccgaattgaccactgtcacgcgcgtcgcgatcctgcgcacgctgcacgatcaccccttcacgagtcacttgaaagccttgcccaaacgcggcggcgacaggctgcaacggcgcaatcgccgggttgcccaccgtgtagttgccattacagccatgggccgccacatccccaccaaagaatgtgccgcagttatccagcacggtgttttcccagttcagctggtagaagccttccacggtgagttggttggtcaggctctgggaggcgaacagcatgttcaccgggatcagcccttccttgatctctgcgcccgggcggcggaaggccgaaacgtcgatggggttgatgctgttgatcgagttaccgataaaggtgctctcgccccagctgaccacttgcttaccgaggcgcacgttgcccggttggtcgccaatcgaatagttgtgatacacgaaggcatcgagcaattcatagccggatgaacgcgcgccctcgtcacgatggtgattgctgatctgcttgaactcgcggtcttcgtcctgcaactcgaagtcgtaccagtacttgccacgcacgaagacgccgctgtcaccgtacttgagttcaaggtcgtggatgcccttgaagatcttggagaaggtctcgcccttcttgaagttcaggcgcccgtcatccccggtagacgcctggccagtaccgccgttgacggtgcctaccagttttttgtctgcgtcgcgcatgccccaactcgcgcccaccgacagcgaggaatcgaattgcccttcgatctcgccaatgttgaacgaaacagcctgtgcctgggcacagcaccccaacgcaaccgcagcggccagcgcctgtggcctgaagatggcgcgcattgttgttcttgtcatgcgtcttccccggtgagtgacagaaggccccaccctactgccgcgtctcaggagcgataagcgcaccaaggagggattcgtgttgtcgctcgaaaggatgacaaggcgctctggccggggtctggccgggggcatgcagcgggtggatagggggttatcaggggaatggatagcacgtacggacactattgccgttttagtaacagtccttgtcacgaaccggcattactcatcctgttacaaacgactattcttagcgggctttcagggcaaacggcccgcttcccccgaccggaagaaaagccagattcaaatagattgaggcctgttttcaatctgttaccggtgttcactgacgttgatttgtcgctccttgatccaacgtctgacttcagccgctgcgtttgcagcggcttttttttgccctgaataaaacggggcgccatcagcgccccgcaggattaaagctttttcaagcaacgatcacaggctgtacttctgcaagttggccatcatttccttcaacgcttcgatgttgtccttggggtgtgccgcgccttcgaagtcgcagatctgctgccagtgcgccgccacgtcttcgggcgagaaccccgcctcagggtcaaagcccacacccaggctgcgttcccagcgggtcttgccgatccaaccgccgcccacttcaaacagcccggaggtttcctggcaggcttcactgcccaggtacaccaccagcgggctgaccagttccggtttgaggcgttcgaacacctgcggcgggatcaagccttcggtcatgcgtgtaccgccggtgggggcgatggcgttgaccaggatgttgttcttgcgtccttccagcgccagcgttcgggtcaggccgtacaggccgagcttggccatgccgtagttggactggccgaagttgccgtagatacccgaggtagacgcggtgaagatcacccggccatacccttgctcgcgcagatggggccaggcggcgcgggtgactttgtaggcgccttcgacatgaacccggtaaaccaggtcccagtcgctgtcgtccattttgtggaaggtcttgtcgcgcaggatcccggcgttgttgaccaccacatcgatacggccgaaggcgtcgagggcgttctgcacgatcttgtcaccgtcggtgacagagtcgtggttggcctcggcgataccgcccgcttcgcgaatctcggccaccacccggtcggcggcggacgcattggcgccttcaccttgcgtggaaccgccgagatcgttgaccagaaccttggcgccatgcctggcgaacagcagcgcatgggcccggcccaatccgccaccggcaccggtgacgatcacgaccttatcctggaactgcactgattcactcataccgaactccaatggcgacaatgggaatgggtcgagtgtcaggcaccggggcgctggtcacaataaagccggccagggctgaatggtgctcgataaggctgagggataatcgtccgatcaggaataggccattcgcggagccgagtggccgatgcgatcacgaaacgccaggtaatgcttgagcacctgcaccggcgcctcgatctgcgggtagtgaccgatattggccaatagcaccgtgtcggcgtgaggcaccagttcgtgataacgcgccaccatgtgagcaccggagatcgggtcgatctcgccgtcgatcacccgcagcggcacatcagtgtgttgcatcgccgccacccaacgctcacgcaggcgtcgacgctgggggatgtaagcgatgagtttgtgcaggatgcgcgtgccatcgttgcggtcgatcaggctccagaagtcgtccagggcgctttcgctggggcgggtgttgggtccgaatatctggctgaaactgttggccagggcattgcgcccgaacgcacgaccgatcatccagcccagggggctgagcagcagcttttgcaccagcgccggacgatgggtttccgggaacaacccgccgttgagaaacacgcagctggccatgtgaaagcggccttcgcagtgccgggccagcagttcctgggccacgctgtcgccatagtcgtgggcgagcacatgcaccggctgatccacacgcaggtgctccagcagcgcctgttgcaagtccgcctgttccaacaggcaataaccatggtcgaggggtttggccgagtcgccaaaaccgagcatgtcgcaggcgatcaccaggttgcgttgggcaaggggctgccacaggtaatgccagtcccaactggcagtgggaaagccatggatcaacaataagggttcgccctgccccgccacccagtagcggatagtgcgtccgttaaagtcgaaggtctggctgcgtttgcgccagacactcagcgggatctcggcgagaggcatcaggttttatacccaggatcgaggctgtccaatttacgcagcaacgccggccacgcaagcgcgccccccataccttgcgcactctttgtgacagccgccaccatcgccttggcaccggcgaggatctgcggcccgatggggatcaaatccgccccgccgctctgggccagcacctggatatcgcaggcgcgctggaaggtaaacatcatcagaaacgtgtcggcgatggtgctaccgcaggtcagcagaccgtggttgtgcagcatcaggaaattattttggccaagatcggcctgcaaacgggccttctcttcgtggttcagcgccacgccttcgtaggcgtgataagccaggctcgacagcacgaagatcgattgctggctgatcggcaagacgccctgcttctgcgccgccaccgcgacaccggcagcggtgtgggtatgcagcacgcacgtcacatcgtggcgcacttcatggatggcgctgtggatggtgtagcccgccgggttgatctcgtaggggctgtccatcagcttgttgccggcctggtcgaccttgaccaggctcgacgcggtgatctcgtgaaacatcagcccgtaggggttgatcaggaaatcgtcggtgcccggcaccttggccgagatatgggtgaagatcaggtcatcccagccgtgcatcgccaccaggcggtagcaggcggccaggtcgacgcgggtctgccattcggcggcgccgacctgatctttgacattctgtggcgatggaacgggggctagactcacggcaacgacctccttggcgcactttcttattgttttttgagtgatgggccagtctagtcagacgccctgcccgccgtagttgccttggcagccagcttgatgaccgtgcgggtcagccttgagaatagtttaaatccgtgcaagcgacgtcagagaagtgccgccaataaaggcgcggcgaacaggttgagcaagccggtcaggaccatcaccaggccagcaaccgagccctcttcgccgcccacttcatgggcccggctcacgcccgcaccgtgggcacccacgccaaacagcgcaccgcgcgccagcggcgtacgcaggggtagccatttgagcagcacaccgccgagcatcgccccaaacacaccggtgaacatcacgaacaccgccgtcagttcaggcacgccacccaggtcggaggacaccggcatggcgaacggcgtggtgatggagcgcggcaccagggacagggtcacagagctgtccagggccaacgctttggccaagccaaatgaggtggcgatggacgccacgctgcccgccaccatccccagcaacaacgccgaccagtaacgcgccagcaaccgccgctgctgccagatcggcacggcgaatgccacggtgacggggccgagtaccagcatcagccagtgagtatcggcggagtattcggcgtaggccgtgttcatcggcacggccaccgccagcaacagcacgggcaccaggatcagcggcgacaacagataacgcccggtacggcggtagatccagcggctgaagacatatgcgcccacggtcaaggcgagccagaacaccggcatcagctcaagcttcatggcgcagcctccagcggcacaccagctccacggtgaacgcggtcaccagcatcaccgccagggtgctgaggccgatgaccagcaggatgcgccaaccgtcattgcgcagcaggccgccgtagtccagcagactcatcagcgcagggatgaagaacagcagcatttcagccatcagcacgccggcccccagttgcagggccgccggtttgaccaggccgctggcgaagaccatcaacaacaggcccaggcctaccacaccgccgggaatctgccacgcccaccacacggccagttggcagccgaacaggtaaatggccagtagcacgaccagttcaatcaacagacgggtgaaacgtttcatgggctttgggtcctcgcaggccttcattttaaagaggcatgtcccatccccacagcgaattgttagactgccagctattccaaatcggaatttcgcacatggaattcaaacagctacgcagcttcgtcgaggtaatccaccgcggtggctttacccaggccggcaaaaccctgcatatcagccagtccgccgtcagcaaacaggttgcgcaattggagcagagcctgggcacgcccctgctcgaccggatcggctcgcagattcgcctgaccgccgccggccaagtcgtcctgcaacgcgccgaagccatgctgcgcctgcaaaacgagctactcagcgagttggacgatatgcaccagttgacccgaggcgagttgcgccttggcctgccattgttggccggtgatacgttgttcgccgaactgtttgccgaataccgcaggcgttacccgaacgtgaccatccagttgctggagggcggcagtcgcaatatcgaacaggccatcctgagcggcgaactggaagtagggggcagcctgaaacccagcgacccggcgtttgcctggcaagcgttctgcgatgagcccctggacgcgctgttgccgattgatcatccgttggcggaaaacgcccaggtacgcctggaggaattggccgacacgccgttcctgatgtaccagcgcagtttcgtgctgaacgaccgcctgatgcaggcgtgtgagcagttgggttttacgccgaaggaaatcggtcgcagtggccaggcggacttcctcgccgcgctggtcgccgccggccagggcgtggtgctgctgcccagcgtggtcgcccgtgggctggtgcgaccgggggtggtgcgcctgacgctcaaggcgcccgactacttgcgctgggacattgcatttatctggcgtgacggcgcctatctgtcgaaagccgcccaggcctggctggcattgctgcgtgagtttccggtcaagcgcgcagtgcagtgaccagctccgccagccacggttcggcgtcggcttccggggtcacactttcgctggcgtccaggcgcaacatcggcagtacttcgcgcacgcccagctcgccaaacagctcgcgcatctgctcgccaccaccgcagaaggtgtcgccgtagctggcgtcacccaggccgatcaccgcaccgggcaggccgcgccaagcggcgggcagttgatcacgaatcgttgagtacaggggttggagattgtcgggcaattcgcccatgccggtggtggacgtcaccgccagaaacgcgtccggcgcaaacgcctgcacatcggcgaggctggcgcgagggttgtgccaggcctcgaaaccggcggcattgagaatgccgacagcgtgacgggcgacttcttcagccgtgccgtagaccgagccggaaaggatggcgactttcatcaatctgatcctgtagttgagcgaaagcctgggatattaacagctgccacaattttttcggcgcaccccgtgcaacattcagggcttgccataaactccacagttcaaaaacaagccatggaccgctcaatgattaacgccaagctgatgcaactggtcatcaacgcctccaacgacggtatcgtcgtcgccgagcgcgaaggcaaagacaagccgctgatctacgtcaacccagctttcgaacgcctgaccggctacaccctggatgaaattctctaccaggattgccgcttcctgcagtcgggcgaccgtgatcagccagcactgatggcgattcgagaggcactggaaagcggaggtgcatgccgggaaatcttgcgcaattaccgcaaggacggcagccatttctggaatgagctgtcgctgtcgacggtgtacaacgaggccgacaagcagacttatttcgtcggcgtacaaaaagacgtcacgttgcaggtcaaggcccagcagcgcgtcacccaattggaaagcgaactggcccaggtcaaggccgaactggccgcgctcaaagcgacgagcggatctaacaaaatttaggaagtgcgatcattaggggggataatggcattttaacacccctaatgagcacgagtgatgcaacgcgatgcgctcctgacccaggacgagctggatttcattcagaacatgcagcacaacccgcaactcaacctgcgggatgcttcatcgagcctgaccgttaacggcggcgcacagattcgcgacttgcttacccggctggccgctcacgaccacctcaccatccaggcacaattcgataatcagcaactgaccttccccttgcacctggtggaagacgagttcaatgccgtgcacctgcgtttgggcgtgccaagcattttcgaagacgggccgatgattcgtccctggcgcctggccctggaaaccccggtggcgctggagaacatcaggggcaacctcagtacgttgtgggtgcatgaagtgtcgttcaagggggtgctggtggagattcgcgggcgggtcaaaccaccgaaaaccttttccctatggttcagcccatccggctacgagcgcatcgccttgcgcggcacattggagcgggaaaccgcccgaggcttgttcgcctatcgcctgagccagagtgatgcggatgaaaccgagcgtctgcgccagttcatcctgcatcagcaccgcctggtgcacccgcacgtgcacgcctgatttcaggtatccaggttgccgctgaggaactgctgcaggcggcgctgcatcaagcgcccgtcactgcccaggcaaccgacgggcgagcccacaaggtctttttccgccaggtccgaagcggcgccggcgatcagcaatgggcaatccagggtctgcgccaagcgattcaagcgtcccacccgctcatgattgtgtgcatgattggaaaacacgatcagtgcctggggatgggtcttctcacagatcagcgtcaattcgtccagcggctggccgaccgccaggaccttcaccgccaagttctctcggctcatcagtagcgcagccaccaacaattccagtttgcggcactcgccggggatggccgcaagcagcacccgcggcaacggctccgcacaggccagttgcaggcgctgcaaggcccggactcgcaggaagttatcgaaaaacaaccattcgctggcctgaccgaaccggccctggtgacgcaacagctcgtgccaaagcggcatcaggatgtcttcaaaagccacgctgagggggtaggtggcaagaacactggcgtactggtgttccaaccgtcggtcgtcgaacgcgctgacagcctgcatcatctgtgcctgccattgagcccagtccccgccctccagcgagtcttgctcggcgcgaacagccagggcttgctggtcgtcacgggcgagaattttcccaaccttgctgaccgccacaccgcgctcgatccaatcgaggatacgattgacggtcgtaatatcagccttggaatacaaccgatgcccgctttcggtgcgtacgggctggatcaggccgtaacgtcgctcccaggcacgcaaggtgaccggattgacgcctgtcattctcgagacttcacgaattggaaacagcttatcggaatcggtcgattcaagatgcaaattgctatcatgggaggcagtgatcacgggcattggagaccaaaaaaccaacggtaaatagaacctcatttaacgcccttagacctgtctttttcaaggtcccagcttattcggaccaatgcctctggcgtatttgtgcaaaacaggaataatccttgcctgtttttacagagcggcaccaccccgccgctttgtttgtgcgccccctacccggcccggcgcacctgaatatttggagatacacaatgtctacctcccccgtcaccctgatggttgcgcgtcgcgtggccaagggtcgctacgaagaattgatggcctggctgcgtgaaggcgagcaattggccacggattttccgggttacctgggctcaggcgtgcttgccccgccgcccaacgatgatgaattccagattattttccgcttcgccgatgaaaaaaccctgcatgcctgggagttttccgcgtcccgcagtgcgtggctgagccgtggcagtgagctgtttgccgacccgtccgaacaccgcgtgcgcggcatcgacggctggttcggcgcagtgggcgcgcgcccacctcgctggaagcaggccgtagccatctggctggcgtttttcccggtgtcactgttgttcaattttgtgctggggccgctgctgagcgaactggacctggcaccgcgcgtgctggtcagtaccctggcgctgacgccactgatggtttactggttcatcccgctgtcgacccacctgttggcaaactggctgcatcctgcccctgcaccgcgcaaggctagcgaagccgcggcgtgaatacaggggcgctcggtcgctggtatagtttcaacctgccagcgactcgagcctcccatgactgcaacaaacgccccgatcctgatcaccggcgccggccagcgtgtcggcctgcattgcgcccagcgcttgctggatgacggccacccggtgattttcagctaccgcagcgaacgacctggcgtgcaggtgttgcgcgagcgtggggcgatcgcagtgtttgccgacttctccagccaggccggtatcctcgcatttatcgctgagctgaacacccatacccagagcctgcgtgcgatcatccacaacgcctcggcctggatggcggagtcgcccgacgacgaaagccgcgcgtttaccgacatgttcagcgtgcacatgcttgcgccgtacctgatcaacctgcattgttcacccttgctgcaccgctcgacaccggccgacatcgtgcacatcagcgatgacgtggtgcgcaagggcagccgccagcacatcgcctattgcgccaccaaggccgggctcgacagccttacgctgtcgtttgccgcgcagttcgcgccgttgatcaaggtcaacggcatcgccccggcaatggtgatgttcaacgacggcgacgacgcgccctaccgcgccaaggtactggccaagtcggcactgggcatcgagcccgggcccgaggtgatctaccagagcgtgcgttacctgctggacaacccctatgtcaccggtaccaccctgaccgtcaacggcgggcggcatatcaagtaagccgtttgtgaggatgttgtatgaccttatccctgccccaccattaccgcgagatcctcaagggcttgggcgaagaccccgagcgcgaaggcctgctcgataccccaaagcgtgccgccaaggccatgcagtacctgtgtcatggctacgagcagaacctggacgaaatcgtcaacggcgcgctgtttgcctctgacaatgacgagatggtgatcctcaaggacatcgagttgtactcgctgtgcgagcatcacctgctgccctttatcggcaaggcccatgtggcctatatcccaaccggcaaggtgctcggcctgtcaaagctggcacgcatcgtcgacatgttcgcccgccgcctgcagatccaggaaaacctcacgcggcaaatcgccgatgccatccagcaagtgacccaggccgccggtgtggccgtggtgatcgaagccaagcacatgtgcatgatgatgcgcggtgtggaaaaacagaattcaaccatgaacacctcggtgatgctcggcgcgtttcgcgagtcgaacaccacgcgcatggagttcctgcaactgatcggacggagcaagtagcaatgccacaacttcaaccaggcatggcgcgcatccgggtcaaggacctgtgcctgcgcacctttatcggtatcaatgaggaggaaatcctcaacaagcaggatgtgctgatcaacctgaccatcctgtacgccgcccaggaagctgtgcgcgacaacgatatcgaccacgcgctgaactaccgcaccatcaccaaggcgatcatcgcgcatgtggagggcaaccggtttgccctgctggagcgcctgacccaggaactgctggacctggtgatgagcaatgagtcggtgctgtacgccgaagtggaagtggacaagccccatgcgttgcgctttgcggagtcggtttcgattaccctggcggccagccgttaacccctgagatttgcgtgaaccttatgaacgaccaacaacgactcgaactcgaagccgccgcctttcgccggctggtggcgcatctggacagccgcaaggatgtgcagaacatcgacctgatgaacctcgccggtttctgccgcaactgcttgtccaagtggtacaaggccgaggccgacgcgcgccagatcgagctgagcctcgatgacgcccgtgaagtggtgtacggcatgccgtacgccgaatggaaaacccaataccagaaagaagccagcgccgatcaacaggcggcgttcgccaaaggaaaaccccatgactgatttgaacaccctgcgcgccagcctcaacagcggcgaacatgtttttgccgataccctggcgtttgtcgctgccggttatgagtaccagccacaggcgttcaccaatggcgaggtagagaatgccgcagggcagaacgaagggtcgtgcaagacgttgggtttggcgctgctggaaggcttgagcgatcaggaagcgctgctggcgtttggtgaacattaccgctcagtggtggcgacgcctgagggcagcgaccacggcaatatccgcgcattgatcgcaaacggcctggccggtgtgaagttcaccgcccagcccctgactcgcaaatcctgagccagacctgaatcaaaatgtgggagggggcttgcccccgattgcagcgtgtcagctaatgaatacctggctgatacaccgctatcgggggcaagccccctcccacatttgtttgcggcgttggttagaacgcagcgtctttcagaccatccaggtaacgctcggcatccaatgccgccatgcaaccggcgccggccgaggtgatggcctggcggtagacgtggtcggccacgtcaccggcagcaaagataccttcgatgttggtcgcggtggcgttgccttcacggccgccctgcaccaccaggtaaccgtctttggcttccagcacgccctcgaacagcgaggtgttcggggtgtggccgatggcgatgaacacgccgtcgactttcagctcgtcgaagctgccgtcgttgttcttcaggcgggcacccgtcacgcccatgttgtcgcccaggacttcgtccagggtggcattgagcttgaggatgatcttgccttcggcgacacgggcatgcagcttgtcgatcaggatcttctcggcgcggaaggtctcgcggcggtgaaccagggtcacggtgctggcgatgttggccaggtacagcgcctcttccacggcggtgttgccaccgccgaccacggcgaccggtttgttgcggtagaagaaaccgtcgcaggtcgcgcaggcggaaacgcctttgcccatgaacgcttcttccgacggcaggcccaggtagcgagcgctggcgccagtggcgatgatcagtgcgtcacaggtgtacacgccgctgtcgccggtcaggctgtaaggcttcttggagaagtcgacctggttgatgtgatcaaacacgatctcggtttcaaagcgttcggcgtgttctttcatgcgctccatcagcaccgggccggtcaggccgtggacgtcgcccggccagttgtcgacttcggtggtggtggtcaattgaccgcccgcctgcatgccggtgatcagcagcggcttgaggttggcccgggcagcgtagacagcggcgctgtaaccggcagggccggaaccgagaataatcactcgcgaatgacgggtatcagacatgactcactcctatcgaccgcccggactacaaggcggctggaataaaaaagggaccacgaagcacttggggaaggcttgaactcgcaggccctgaaaaataatgggtgcagcgtatcgaggggggcaagattaaggaaatacggaataacaatccagctcatagacggtcactatgtagttggcccgactgatcgacgggtttgttacggctgatgtcgcggctttcgcctgcgatgtaaagccggtaaggtcggcgcgttcgcccttttgctcggagttctccatgcctgcccctgctctttccggcccgcaatacctgcgcgaaggcctcaaactcgtattgagccccggcctgcgtctgtttgtgctgctgccgctggcgatcaacctggtgctgttcgttggcttgatctatttcgccggtcatcagttcagcctgtgggtcgatcacctgatgccgacgctgccgagttggctgagcttcctgaactatctgctctggccattgttcgtggtgctcgtggtgttgatggtgtttttcaccttcaccatgctcgccaacatcatcgccgcccccttcaacggctttctctctgagaaggtggaagtggtggtgcgcggcaccgatgacttcccggccttcagttggggcgagctgatcgcgatggtaccgcgcaccctcgcccgggagatgcgcaagctgggctacttcctgccacgggccatcggcctgtttatcctgtcgtttattccggtggtcaatttggtcgctgcaccgctgtggttgctgtttggcgtgtggatgatggcgatccaatacatcgactacccggccgataaccacaagctgggctggaacgagatgctcgcctggctgcgccagaagcgctggcagagcatgagtttcggcggcatcgtctacctggtgttgctggtgccggtggtcaacctgctgatgatgccagcggcggtggctggagcgacgttgttctgggtgcgcgagcaaggcgccgaggcgatggcagcgcagcaaaaggtgactcagtcataaatccatcatctcgatgacacaatgacgacatggcccacggtgacactgtgggtcatgacgacagcttcgcttcacatcacccttatcaccgaaaccttcccgccagagatcaacggggtggccaatacccttggccgcctgtgcgaggggttgcgggcgcgtggccatcaagtcgagctggtacgcccgcgccagggcgtcgaccagagccgccccagcgacgacgcgttactgctatgccgtggctggccgctgccgggatatccgggcctgcagtggggccagtcgtcgatgcacaagctgctgcggcgctggacgcgtcagcgtccggacgtgctgtacatcgctactgaaggccccttgggcttgtctgccctgcgtgcggcccggcgcctggggatcagcgtggtcagtggctttcacaccaacttccagcagtactcgaaccaatacggcttgagcatgctgagccggatggtcacgcactacctacgctggtttcataaccgctcaaccctgaccctggtgcccagcgccagccagcgcctggagctcgagcgccggcatttcgaacgcttgggaatgttgtcacgtggggtggacagccaactgttccatcccgcaaaacgtgacaatgcgctgcgggaaagctgggcattgaacagcgaacagactgccgtgctctacgtgggcaggctggcgcaggagaaaaacctgggcctgctaaagcgctgcttcgaaacgttgcaagacacctacccaatgcgccagatgaaactgatcatcgtcggcgatggcccacaacgcgcggcgctggaaaaggagctgccggaagcaatcttctgcggcaccttgcgcggtgaagaactggcgcggcattacgcatcgggcgatgtgttcctgttccccagcctcaccgaaaccttcggcaacgtggtgttggaagcgatggcatccgggttgggggtggtggcctacgaccaggccgctgcaacccagcatatccgccacggctacaacggcgtgctggcgatgcccggggatgagaacgcattttgcgaggcagccaactggttgctggaagacgccgaaagcttgcgccgcatgcgcctgaatgcccgccaacacgccagccgccagggctggccggcgattatcgagcagttcgagcgtcagctgcgtggggtttgcaaggacgggcatccggtgcccgccctgtcgccgcttacaccagggtcgtcaacgcctcacgactgaaaggcaggatgtcgccctcgcgaccctcgcgcaccttcaacgcccaatccgggtccaccagcagggcacggcccacggcgaccagatcaaactcgtcgttgttcaagcgctccagcagcttctccaggctggccggttgcgcgactttgtcggtgttgaccatgaactgcaggaactcgccatccaggcccacgctgcccacggtgatggtcggcttgccggtgagctgacgggtccagccggccaggttgaggtcggaaccttcgaattccggctcccagaaacgccgagtggagcagtggaaaatgtccacacccgcatcagacaacggcttgagaaactcgcccagcgcttgcgaggtttgcaccaggcgcgcggtgtaatcctgctgtttccactgggaaaagcggaagatgatcgggaaatcagggccgaccgcagcgcgggtagcctggatcagttcaatggcaaagcgtgagcggttggccaggctgccgccgtattcgtcggtacgctggttgctgccttcccagaagaactgatcgaccagatagccgtgggcgccgtggatctccacgccgtccatgccgatgcgctgcgcatccttggcggcttgggcgaaggcgttgatcacatccttgatgtcttgctgggtcatgccatgcacgacgacgttgccatccttgagtttttccatcgggccgtaggccggcacgctggcgtcaggttcagtgccgatacggcgcacactacctacgtgccacagctgagggacgatcttgccgccttcggcgtgtaccgcgtcgaccactttcttccagccggccagggcggcttcaccgtagaagtgcgggacattggggtaaccgttggaggcctggtggccgaccactgtgccttcagtgatgatcaagcccacaccggcggcggcgcggcgacggtagtactcgatcactttggagttgggcacgccacccggcgagaacgagcgggtcatcggcgccatgacgacgcgggtcgacagttgcaatgcaccgagctggaagggtttgaacaaggcttggacgggcatgggggcactccacggaagacggggtttatgatgtggataatatggggagtgcagcatgctgggtagcactattgatctgggtgattaaggggtaaaagtgatggccggttggggctgctacgcagcccagcgcgggacgagcccgctcactacaactgcggcgctcagctgagggctttttcgatggcctggacgatcgtcgggtcatccggtgcggtgcgtggggagaagcgcgcgagcactcgcccatccttgcccagcaggaatttttcgaagttccaggtgatatccccaggaaactctgcgccctcgcctgccagcaggcggtacaactggtgacggtcaggaccgttgacctccagcttactgcccagagggaatgtcaccccgtaattcaggctgcagaactcctggatctcttcttctgtccctggctcctggccagcaaactgattgcacggcaggccaagcacggtaaacccctggtccttgtactgctggtagaggttctccagcgcggcgtattgcggggtcaagccacatttggaggccacgttgaccaccagtaccacttgccccttgaagggcgccagcggcagctcttgtccgtccaaagctttgagtttcaggtcgtggaaagcactcatgacgaactccagatatcccatgttcttcgcattgcggcgcttcgagattacaactcacaagcctgcaatcatagacgccgattgcaaaacgcgcctgcgagttactgagcggtaggccagggcagaatcggaatcgccgtcacggcattctgcgggctgccttcgatcaggcggtcgctgtacaccaggtacaccagggtgttgcgcttcttgtccaggaagcgcaccacctgcatggtattgaacaccagggaggtgcgctccttgaacacttcgtcgccgtccttgagttcgcccttgaagcggatcgggcctacctgtcggcaggcgatcgaggcttcggcgcgatcttcggccaggcccaggccgcctttcacgccgccggtcttggcgcgcgacaggtagcaggtcacgccatcaaccttggggtcgtcaaaggcttcaaccacgattcggtcgttggggccgacaaacttgaacacagtggacacctggccgatttcctcggccgaggccagcaacggcatggccagcagcaggccgaacaatcccttcatgacacgcatggtgtattcctttggttagaccaggatcaggttatcgcggtgaaccagctctggctcagccatgtatcccaagagtccgacaatcgcatcggaggattgtccaataattttctgggcttccagcgcgctgtagttggccaggccacgggcgattcacgaccgtcgggctaggaaaagaggcgacgcggctagattgaactagccctccatagcatatttttctataagaacaagaaaatataaatcgtctagaaatataaacatttggttaatgcaatactttacagaaatcaaaaacacacactaaaacaatgagttacacaaaaaaacaaaatgataaaacataaggactacaagcgaaaaagataaaagccacacaacaataagaattaggctataaaaaaacgtcacagaactcacatcctcgaaacagcaaaaccgcccaaaacatccaaagatatatttagttacatgacgcaacttgcccagacaactagcacaaacaagtatgtaaaacgcaaattcagcaaaaccccacaccacacacagaatgaaaaagcaaataccttatggcataacagcaatacttctgggcttctccaccatctctgacgcagcaccaagcatgaagtcaagtcatccggaacaagcaatagaaagtacgtcattaaacagggccaactcagtacccctaacgtcaacgctggaggatcacttcatagacgaatacaaaaggctaaacgcatcttgcaactaacaaagctaacgcgcgcggagagctaatgaattcaacgcagacgctctccgcttgctatcaaaacgaaggaacgtatatggacaattgcacccaaattaaaaatcttatttttcacgacgcggagggcaacagaattggattaattgccccttcaactttctactgcatatatggtggttgcacatatataaatggcccaaagaaagtaattaagttacacgaacaaaccattgaagctttaaccgaaggattacgacaatcaggatcgttgatagagggtgatcataaagacattgaaaaattattatcattgctcgcaaaccctattagcagccggaccgctagctttttcatgtgtgcaaatcaaaatggcaaaaaaataattgacgactttaagtccatagaaaattcaaacctcttaatcgtaggatgcggaggcataggcagcacggcggctttgctgttagctggctgcggagtcaaaaacataacattagtggactccgatattatagaaaaaagcaatttaaaccggcagttattctggaaacttgaagatataaaaaaacccaaagtagaagtattaaaaaaagccattgaggaacgatttgaagacacaagcatcacgaccctacagactcacttagacctcaacggactaagacaacttgttggaaaaaagaaatttagcgtcgttttagttactgctgatgacccaccaacaatgtcggctcagtgcgcagacctagtaaaacactctgaaacaccattcgtgagtggtggatatctacacggacaatgtgctgttaattttttccctgtatctcttcacgaagaactccgtgaaatccacccaaatgcaagtaaatggaaaaagcttaatccgtcaataatgcccagcttcgggcccaccaatatgaacattgcatcgttattagcgtccggggcaatttcttttatagcaaaccactcactcccactaaaacatcatacatcaattcaatggaatgcaagcattgcacccagctcattcagaacattcactgatgaaaaacaacactaaccaagagaaaacatcatgaatattataaaatcaatacatatggcgctaggtttactgatagctaccagtgtaaatttatcaaatgcaaacgacctcgtaactgatacttcaacctcacatgtactaacaattgtattcacccctcctaaaggtatggagcgcgagttttttgaaaactttgtgcaaaaccaatcgaaatacatgcgtatttactcgggaaagcaaaaacaaaatactcaagtgataaatattgcaccaacaaccctaggagaaccgcttatacatctaataatctataataacaaagcttcatttgataatgcgaaagacatatttcgcagcaccgaagtttttgcgaactacatgcaaaagcactcttcccgattcggaaactacgaaatatcaaaaccgtacctagagaactcaaacgtttattttggagaggtgataaaaaactaaaatatgcgaacagtaggtccaacatgaaacttaccaaaaccgctttctatagcctaatgctatgtagcttagccaactcatcagttgccgacagcattgtaaataacctaacgattataaatagctgcataaactgtcatggtataacaggaagcaactcaaacgaaataccacagttccataaaaaaaacgaggagcaattaacacaaatactgatggcctataaaagcaaaaatacaaaagggaccatgatgaatagagtcatggagcaatatagccaacaggacataaaggctatagctattatttttagccaggcgaaccgctgagtatgattcagcgtttactcttgcgcttccacaaactcggagttactccactatgactaaatcacgcagagacgctataaaattaattctggctagtcttggctacgcccttaatacttcgggcgccgcaacagaaaaagctcagattacagcctcaaaaaaaatagtcatcattgggggtgggtttgccggagccacacttgcgaacactctacacgcgctagataacacactccatataactttaatcgaaccaaataaatactatcattcatgcccactcagcgccgagtacttagtaggtaagcgcactaaagaatcgctaacatttagctacagaaacctgtctaacgtaaaatcaattcatgttattcacgatactgccacgcatattgactatgaaaagaaaacaatactaacgaaacgttctggcagtcacagctatgaccgatgcgttgtaggtattggcgtaggctacaagtttgactcaattgaaggttatagccctgaagtttccgaacaactcccacacgcatggtcaggtggagagcaacaagcgatcttaaaaaaacaacttatgtcgctacgagacggcggaacggtattgatttccgcaccttcaggcgactacaaatgcccgccaggaccatacgaaagagcaagtctaatagcggaatttctaaaaagaaacaggcgccgatcaaaaataattatattggatggaaaaagtgattttcctaagcaagagctttttgaaaaagcatggagggagttgtatggctatggaacatctaacagtattattgagtggatcagttcggaaaagggtggcattgtctcagccgtcaatccaagaaacagagatattctaacttccgctggaactattagagcggacatattgaatatcatcccccctcaaaaagccggcacatttgcacatttcaacgacctaaccggacctcatggctggtgtccaatcgatacgaagacttttgagtcatcgattaaaccttacgtccacgtaattggtgacgccgcctacgctgaaatgcttcctaaatctgcattcacagcatgcgttgaagcgcgagtctgcgcagtagctatttactgcctattcaacaatcatcctattccatgccctcaattcatgaatgtttgttatagcttatgcgcggagaactacggaatatctgtattcttacgttatgaaagaaacataaaaacaaacatacttgatataaaaaacctagtaaagacccccctgaactctacaaaagaagactatcgaaaagaatcccaatttggctatagcatgttcaatactatgacagcagaagcatttgggtaacttcactcaggaattcaatatatgctattagacctttcatccataagcaaagttagctaccccgactttattgctttaatgaagcaagataacactccacctggcggaatagaaactttaaattattggataacaaaaggaaaaatccatcggaaatctacaattctagatttagcttgctctacagggtttagctcaagatattgctttcagcagacaggagcaaaatctattggcattgacatctctcttgactctatcaacgtggccaataataaagttagggaaatgggggcagcagcatgcgtgacgtttctaaatatggacgcttgcaaattatctttcaaagatgaaaagtttactcacgtattagcagggtgtaacttcgcattcatccaagaccgttcaatagctcttgacgagtctcttagaacactgtctaaaaatggggcaatttgcgtttcaaacttttattataggaccccaccgccaaatgaaatactggaggaagtccgtcattccattggatttaaaccaagtcataactggacctacgaatattggctaaactttttccagtctaaaggcttaaagctttcttatgaacataattataatctagcctccatccctgaaaccgtactccacagatccatagaacaatatatacacaaggaaaacacttttacatccactttaattccagagttcaagaatgaattttttcaaaaattttatagcataaaaaaggcccttaactctcagcgaaattaccaaggagtgtcagtacagatatggcacaagccctagcccctacacgcgtgagaaacgctatatctcggatagctcaagatcactctttagatgatgcctttgtagtcattgatatggttgaggttctggaaagagctatttctttcaagtcatgtgcagaaaagcactttaaaaatattgaaattgcatactcatataaaactaacaacctatcctctctttgtaatgcattaagccaaaaaggcttttccgccgaggttgtgtcgttggatgagatgcattgcgcgatagctgacggatatcttttggataagatactttttgatggaccttacaaaaaatattcggagttggagtttgcaatatcgcacaatgtaaggatacaagttgacaacatatttgaactagaaaacatatattacatatgcaaaaagtcaaataaaacagcacaaatctcgctgaggctttcgcaccactaccgccttgcccagtctagatttggattaaacaagcaggagttacacatagccctaagtaacaaaaaatacactgacaataatcatataaacctcaaaggctttcatcttcactctggctctaaccttaaagatacagctagtattgaaaatactcttaccgaatatgcagacattattcttcgatatatgcctgaagatggatggcttgacctaggcagtgggtttcctgcagattcattttcttcagacccacaccaacctacacctactgtagattcatttatgagaaatcttaaaactgagcttagtaggctattcaaaagcgcgtatgaaaattggaaaattatatttgaacctggacggtgcctggtagaggactgtggatatttcgcaacgaaaatagtcagttcaaaaaaaagacttgatacaaccatcctgcaaagcaacatcggtataaattgggttccatcagtacacaactgggctcactccattgaaccaatcacacccaatacgactttaccaccaaacaagcaagtcattagcggcatcaattgtttcgaatcagactacatttgtttcgacttcaacaaagcgaaaatcgatataggtgactaccttcttgttcgcggctgcggcgcttatgacttacaaacatcaaatatttggacccgatgcggtgtcagagtttactcgatattctcccacggctgcgtactgtccagaacccaccaaaaaagcgaaagtctgcgaactcgcgacgtaccgactttaaacacaaaaattgtgatttctcagtctttacatttgcttgaggcaaatcaaatatattacaaagagctacataatttaatcatagaaaacaaattttatctaagcgagtttcttgactggcctaagttcataaataccgagacggacaccctagagtttttagccaacgcagcaatacagcataaaaggtcatcctcaaaaacgtttatcatttcctataacaaccaatgcacaggtgtaatctctttcaacaccatagataggcataatcaaacagcagagattggatactggatctcacagaacaatgaaaaaaaaggaatagtttcctctgcactaaaacacctaatagaaatgtattcaaaagacaattacataatgcgattcgtaattaaatgctcaaccgccaacatcaaaagtaaccgcgtcgcgaagaggaacggatttaaacttgaggggaagttatttaaagcagaaaaagtcaacgaaatcttttatgaccagcacatttactcgaaaacgatgcatccctgacatcgttaacccaaatattctctatgagcttataaagctactgctaagaagcacgcagccttaacttatccattagtcacgttcggtaggccagggcagaatcggaatcgccgtcacggcgttctgcgggctgccctcgatcaggcggtcgctgtagaccaggtaaaccagggtgttgcgcttcttgtccaggaagcgcaccacctgcatggtcttgaacaccagggaggtgcgctccttgaacacttcgtcgccgtccttgagttcgcccttgaagcggatcgggcctacctggcggcaggcgatcgaggcttcggcgcggtcttcggccaggcccaggccgcctttcacaccgccggtcttggcgcgtgacaggtagcaggtcacgccgtcgaccttggggtcgtcaaaggcttcaacaacgattcggtcgttgggcccgacaaacttgaacacagtcgacacctggccaatttcttcagcagaggccagcagtggcatggccaacagcaggccgagcaatcccttcatcacgcgcatcgtgtgcttcctatggttagaccaggatcaggttatcgcggtgcaccagttccggttcagccatgtaacccaatactccgacaatcgcatcggaggattgtccaataattttctgggcttccagcgcgctgtagttggccaggccacgggcaatctcgcgaccgtccggcgccacgcacaccaccatctcgccccggcggaagctgccctgcaccaacttgacgcccaccggcagcaggctcttgttgccttgagacaacgccgacacggcaccctcgtccagcaccagcgtgccacgggtttgcagatgaccggccagccactgtttgcgcgccgcgagcatgccgcgttccggtgacagcagcgtaccgatgcgttcaccggccttgaggcggtccagcacacgttcgatgcgcccaccgacgatgatggtgtgggcgccggaacgcgccgccaggcgcgcagcgcgcagcttggtctgcatgccgccacggcccagggcaccaccaacgctgccggccacggcgtccagcgccgggtcatcggcacgggcttcgtaaatcagttgagcgtcgggattgttgcgcgggtcggcgtcgaacatgccatcgcggtcggtgaggatcaccagcaggtcggcttccaccaggttggccaccagggcggccagggtgtcgttgtcgccgaagcggatttcgtcagtgaccacggtgtcgttttcgttgatcaccgggatgaccttgagctccaccagcgcgcgcaaggtgctgcgggcattgaggtagcgcttgcggtcggacaggtcgtcgtgggtcagcaggatctgcgccgtgtggcgaccgtgctcggcaaagctggattcccaggcttgcaccaggcccatctggccaatggcggcggcagcttgcagttcgtgcatcgcgctgggtcgcgcggtccagccgaggcggctcatcccggcagcaaccgccccggacgacaccagcaccaactccacgccagcctcatgcaaggccaccatctgctcgacccagacgcccatggctgcgcgatccagccccttgccatccgccgtcagcaacgcactgccgatctttacgacccagcgctgcgcacctgtcactttgctccgcatcatcttcaaccttagattgagggcagcgcgacccagcgcggcccataacgttaaacccggatactaaaacgccgctctataaggagcggcgttcaagtttatcgcaacgaatcagtcgcgcacgtaaatgatttcaggaccgtcttcatcatccacgtcttcttcgtcccaatcgtcgtcgccgatgtcatggaccgacttcacgccgctgcggcgcagggcgcgctggtcatccagagcctgcagttgagcgcgggcttcgtcttcgatgcgctggtcgagttcggccagttcggccttgaacaccgggtcggccgccaggcggtcggcacggtcttcaaggtagcgcatgatatcgcgggtcaggcgctcggtgccttctttggcaatggcagagatcacgtagaccgggccttcccactccaggcggtcgacgatttccttgacgcgcgcttcgtgttcttcttcgaggatctggtcgcacttgttcagcaccagccaacgatcacgctcagccagggacgggctgaacttggtcagttcgctgacgatcacttcggcggcatccggtgcactggtgtcatccagcggcgccatgtccacgaggtgcaacagcaaacgggtacgcgacaagtgcttgaggaagcgaatccccaggcctgcaccatcggaagcaccttcgatcaggccgggaatgtcggcgatcacaaagcttttccaacgatcgacgctgaccacacccaggttcggcaccagggtggtgaacgggtagtcagcgactttcggcttggcggccgacaccgagcggatgaaggtacttttaccggcgtttggcaggcccagcaggcccacgtcggcgagtactttcatttccagcttgaggtcacgctgctcacccggcttgcctggcgtggtctggcgtggcgcacggttggtactggacttgaatcgggtgttacccagaccgtgccagccgccctgcaccaccatcagcttctggccggccttggtcaggtcgccgattacttcctgggtcgcggagtcgatgatcgtggtgccgaccggtacgcgcagtaccaggtcttcaccttttttaccggtgcagtcggtgctgccgccgttggagccacgctcggcatcgaagtgccgggtgtaacggtagtcgaccagggtgttgaggttttcgtcggccatcatgtagatggaaccgccgtcaccgccgtcaccgccgttggggccaccgttttcgatgaatttttcgcgacggaaactcatgcaaccgttaccgccgtcgcctgcttttactcggatggaaacttcatcaacgaacttcataacaaaacgcctctcgccgcttggacgagcttaagaaaccaagacataagactcttgcaaaaatgagcgcagcgacctcaatcagcgaccgcaaaaccagcgcctgagcccattacaaacagctttgcaagagactcaccccacaaacgaaaaagccccgtcgcaagacagggcttttccagcgatctcgcaattaagctgcgacaacgctcacgtaacggcggttgaacgcgccttttacttcaaacttgatcacgccttcgattttcgcgaagagggtgtgatctttacccatgcctacaccgtaaccggcgtggaattgggtgccgcgctgacgcacgatgatgttgcccggaatgattttctggccgccatacatcttaacgccaaggcgtttggcttctgagtcgcgaccgttacgggtactaccaccagcttttttgtgtgccatgagtcaattctcctagtgaggaattaggctgaaattaagcctgaataccggtgattttgatctcggtgtaccactggcggtggcccatacgcttcatgtggtgcttacgacgacggaacttgatgatgcggactttatcgtgacgaccttgggagatcacttcagccacaacggtagcgccagcaacaactggagcgccgatgttcacgtcatcgccattggcgaccaacagaacgcgatcaaaagtaacggattcgccggtagcgacttccagtttttcgatcttcaggtattcacctggggcgactttgtattgcttgccaccagtaacaattactgcgtacgacatggtatttctccgataatcctgctcacccagcgctttataagaagaggtattggctggcatggctgcatgggatggacgtcccgaatgcaattgcgtaaggcaggtgctgcccaggaagttcagggtgcgcgattgtacgcaaggcaacggggtgttgcaagaggccgtctatcgcgccttgacactacggggcctgggtcctagcatgccgcgcaacccttctggagcgactgtcgctgatgcaaccccaagctttctaccgcgcggtcgcggacgattttagcgccgtcgacggcatcatcaagaagcagctgacttctaaagtgccgctggtctccaaaattggcgactatattacgtcggcgggcggtaagcgcctgcgtcctttattagtgttgctgtgcggcaaggccctgggccgtgaaggcgatgacctgcgcctgctggcagccaccatcgaattcctgcacaccgccaccctgctgcatgacgacgtggtcgacatgtccggtatgcgccgtggccgcgagaccgccaatgccatgtggggcaacgcccccagcgtactggtaggcgatttcctttactcgcgctcgttcgaaatgatggttgaactcggctcgatgcctgtgatgaagattctttcacaggccacgcgcatcatcgccgaaggcgaagtgttgcaactgtcgaaggtccgcgacgccagcaccaccgaagaaacctacatggaagtgatccgcggcaagaccgcgatgctcttcgaagcctccacccacagcgccgcagccttgtgcaacgccaccgccgaacaggccgaagcgctgcgcacctttggcgatcacctgggcgtggcgttccaactggtggacgacctgctcgactaccgtggcgatgccgaaaccctgggcaagaacgtcggtgacgacctggccgaaggcaagccgaccttgccgctgatctacaccatgcgcgaaggtacgccggaacaggccgccctggtgcgcaaggcgatccagaaaggtggtatcgaagacctcgaagccatccgcgccgctgtcgaagcgtcgggttccctggactacaccgcgcaactggcgcgtgatttcgtggcgcgtgccatccagtgcctggaagccctgccagccagcgaataccgggacgccctggtcgagctgagtgagtttgcggtcgcccgcacgcactgacgcggacgaatgtgggaggggctcctcccacatttagatttcatacaacctgtaagaccacaaatccctatataatgtgcgacttttagccatcctgactttcaaggagctttagtgagcacgttgccaccctgcccgaaatgcaattccgaatacacctacgaagacggcgcccagctgatctgcccggaatgcgcccatgagtggtccgccactggcgaggccgaagcggccggcgatgaagccgtgaagaaagactctgtgggcaacgtcctgcaggacggcgacaccatcaccgtgatcaaggacctcaaggtcaaaggcacctccctggtagtcaaggtcggcaccaaggtcaagaacatccgcctgtgcgacggtgaccacgatatcgattgcaagatcgacggtatcggcccgatgaagctcaagtccgagttcgtgcgtaaagtctgaacccgctgcacccatcccgcgcccgccgcgggatggcgtttcgccctctgcgttgacctctcgcaatatccacacagaaaaacccggaaatcgccaataggcacttgctattctacgaataagaattattctcattgaaacccatcaaggagatgcgacccatgacttatttgatagatgcctggctggaccgcccacacccttacctgcggatcctgcatcgggaaaccggtgaagtctgtgcggtactggaagaagaagcgctgagtgaactgcaggatcagggcgacctggacgtgaatggcctgagttcgagtgaacctggagtgctgaaggaggtggtgcgtaatctgtttctgttctgctatgcccgagcgttgcgcccggcgacggagctgaatggcaagttccatccatgaacacacccgcaaaacactgtggggacgagcaggctcgctcccacaggtaatcagcaggtcttacagaacgtcgagcagctcgacgtcgaacaccagaacgctgtgcggcgggatgctgccaacgccttgagcgccgtaagccagttcgctcggcacgtacagacgccatttgctgccggcattcatcagttgcagggcttcggtccagccggcgatcacgccgccaaccgggaattctgcaggctgaccgcgctcgtaggagctgtcgaacacagtgccgtcgatcagggtgccgtggtagtgagtacgcacttggtcttcacgggttggcttggcgccatcaccggcggtcagcacttcgaactgcaggccggaggccagggtggtgatgccatcacgcttggcgttttcagccaggaatgccaggccagcgcccgccgcagcttcagcctttgcagccgcttcggcctgcatgatttcacggatcactttgaagctggcagccatttgctcctggtcaacacggcttggcttgccggcgaaagcgtcggtcaggccggccaggattgcgtccaggcttacaccaggtggcggattgtcgcgcagttggtcgcccaactgacggccgataccgtagctgacgcgggtttcgtcggtggacagattaacttcggacatgaagaggctccgctgtagggcgacacagtttcccgtgtcatccaaaactaaaagggcccgcagactagcacaaaaccggcgcgcacgatgagcttggcgcctcgtgccggcgggccgccgttagtcggttactcgcgggggcgctcatctattcacgaataaaaagtttcagattcccactcacccgccgatacagcgctacacatcttggctggctcaaacaacaacaccgcccagcagacagacatcacctttgcggagcattcgatgaacagctggttcggtaacatcagcgtcaacctcaaactcggcctgggcttcggcctggtgctggtcctcacctcgatcctcgccctcactggctggaccagcctgggcagcctgatcgaccgtagcaactggatgagcgacatcacccagctcaacgcgtcgctgaccaagctgcgcatcgtgcgcctgcaatacatgctcgccaacggcgacgaggccgtggcccagaacgtacagaccaacctggatgccttcgctgcccagcaacagaaactgctggacagcttcaagagcccggagaacgtcaagctgctcaacgagcagaaagcgatcatcaccgcttaccagcagtcgctaaataaaatgcgtgaggcctaccgtaacggcaacgcctctcgccaagtaatgggcgacaaagccgacatcgccaatgcgcagatcaatgcgctggagaacagcgtcaagcaaatgcctgacagcacggagcacctggcccagttccaggccgtggccgacgccaagatgcaattccaattggcgcgctacgaagttcgcgggtacaccggtaacgtcaacccggacaccgaagcccgtgccgccgcacagattgaaaaagccatcgccggcttgaaagacctcagcgccgctttcggtagcagccaacagaacgcactgacctcgctggaaaccgctctgggcgcctaccgcactgccgtgcagaactacaaggcggccaatgccaacatcgtcaccgcccgggccgaaatgaccacccaaggcgccgatatcgtgaccatcagcgacaagctgtacgacattcagctgaaccgccgcgacgccgaaagcgcccaggcccgcagcctgcaattgatcagcaccttgctggccctgctggtcggcgtgattgccgcgctggttatcacgcgccagatcacgcgcccgatccaggaaaccctggcagtggtggaacgtatcgcttccggcgacctgagccacaatatccagattacccgtcgcgatgagctgggcgtgctgcaacaaggcatccagcgcatgggcaccaccctgcgcgaattgatcagcggcatccgcgacggcgtgacccagatcgccagcgccgccgaagaactgtcggccgtcaccgagcagaccagtgccggcgtgaacagccagaaaatcgagaccgaccaggtcgccacggcgatgcacgaaatgaccgccaccgtgcaggaagtcgcgcgtaatgccgagcaagcctccctggccgctgctgacgccgatggccaagcccgtgccggcgacaaagtggtcgctgaggccatcgcccagatcgaacgcctggccgctgaggtggcgcgctccaccgacgccatgacccatctgcaacaagagagcaacaagatcggcagcgtgatggacgtgatcaaggccgtggccgaacagaccaacctgctggccctcaacgcggcgatcgaagcggcgcgtgccggtgaagccgggcgtgggtttgccgtggtggccgacgaagtacgtggcctggcccagcgcacgcaaaaatccaccgaggaaatcgaaggcctggtcgccggtttgcagaacggcacccagcaagtggccaacgtgatgaacaacagccgcagcctcaccgacagcagtgtcgagctgacgcgcaaagctggtgtgtcgctggagaacatcacccgtaccgtgtcgaatatccagtcgatgaaccagcagatcgccgccgccgccgagcagcaaagcgcagtggctgaagagatcagccgcagcatcgtgaatgtgcgtgatgtgtcggagcagaccgctacggcgagtgatgagacggccaagtcgagtgtggaactggcgcggttgggcagtcagttgcagcagatggtcagtcatttccgggtataaaagccgcagtccctgtggcgagggagcttgctcccgttagggcgcgaagcggccctgatcaagttgatgcagatttgaagttgagagcgcagtgaatgcttggggctgctacgcagcccaacgggagcaagctccctcgccacaggcaaacttagacatactcggccctccgtgagttgggccttacctccagcacacttaccggaacacgtgggccttcggacgcgagtcgattgcgtcctttgagagtgcaaccccagccactaactggtgttgcaaaaaaaaccgccctaccaaggcggttttttattgcctgcgatttgcccctcagccctcaccttcctcaacaaacaccagccgattcccaaacgggtccttgatgctcatctcccgcgcgccccaaggcgtttcctcaacccctggcttggcataccgataatccttgcccaccaattgctgctgatacgcgtccaccccctgggcctgaatccgcaccgccgcgcccggcgacgcatcgccatggtgctcagtcaaatgcaacacgcattcacccagcgacacttgcaggtacaacggaaaactcgcttcaaaacgatgctgccaatccaccttgaaccccaaaaagtcgacgtagaattccaacgccttggcctcatcgaaaatccgcaggatgggggtgacttttcctaagtgcatggcaatcgctccgttcataagagcgcccactataaagacgaaaatccccgacgcaaatccccactgcgcgccaggaaacgcccctgccgctgaccgttcgcctgcccgtcgcagtagctcaacactccgttgacccacaccccatcaatgccttccgccgcccgctgtggttgcttgaagtccgccacatcgcgcacgcgcaaagggtcgaacagcaccaggtcggcccagtgcccttcgcggatttcaccgcgctcggccaggccaaatcgcgccgccgacaagccggtcatcttgtgcacggcagtgtgcaacgggaacaacccgacatcccggctgaaatgccccagcacccgtggaaacgcaccccacaaacgcggatgcgggaacgggtcctctggcaacccatccgaccccaccatcgacaacggatgcgcgagaatccgccgtacgtccgcctcatccatcccgtaatacactgcccccgccggttgcaggcgacgcgctgcgtccatcagcgaaacatcccactcagcggcaatgtcctgcagatcacgcccccccatgtccgggtgcggcgtcgaccaggtgatggtgatgcgaaacgcatcggtcacctgcttgaggtccagggtcgaagaactcgcagcatagggataacaatcacagcccaccgggtgggttttcgccgcccgctccagcgatgccaacaactgcggactacgcccccaattcccggcgccggcacatttgaggtgggaaatgatcaccggtgcctgggcatgtcggccaatcaaaaacgcctcgtccatcgcctccagcaccggctcgaattcgctgcgcaaatgggtggtgtacaccgcgccgaaggccgtcagttcttcactcagttgcagcacctcatcggtctcggcgttgaacgcgctggcgtaggccaggcctgtggataaccctagggcaccggcttcgaggctttcttgcaactgcacgcgcatggcggcgatttcgtccgctgaagcgctgcgatgcaggtcttgcatgtgattgctgcgcagtgccgtgtgaccgatcaatgcggcaacgttgaccgccgggtgagcctgttcgaccgctgctcgatagtcagtaaaacgcggatacacaaacgccgcagcgctgcccaacaggttcatcgggtccggcggatcactgcgcaacgtcaccggcgacgcactgatgccacagttgccgacaatcaccgtggtcacaccctggctgagcttgggcagcatctgcggatggcggatcaccaccgtgtcatcatgggtgtgcacgtcgataaaacccggcgccagcacacgcccctgagcgtcaacctcatgcgcgcccgatgcgctcgacaaatcaccaatcgcctcgatacgtccggcgcgcagccccacatcggccacatagcctggggtgttgctgccatcgatgatcaatgcctgacgaatcagcgtgtcgtacttcatatcagtctccaagcggcaggctgtcaggcccgccgcgataatcgtccagggccagcttgatccggcgcaggcgttcctgattgccatccggcgaggccagagccaactcggtggcgagcaggtcgatagccagcagcatgccgtagcgggcggcggtgggcttgtagataaaactggtttcggccggctgcagcggcagcagcacatcggccaattgggccaagggcgagtcggccagggtgatggcgacgatgcgcgcgtcgtagttgcgcgccaacgccaccacgtccagcagttcgggggtgaggccagtcaaggaacacacaatcaacgcatgctcaggccccagcgtcgccgccgtaacccgcatcatcaccgggtcatggcaggccgcaatcggatagcccaggcgcaccaggcgcacctgcaactcatcgctgcacaggctcgacgggccgcccatgccgaacgcatggatcatccgcgccttgcccaacaggctgaccgcatcgacaaaactggcctggttgaatccggagagatgctgacgcaacgtcgcctcgatatcccccaggatctgccgatgaaacgccgactgttccggcaaccccgccgggtcgaggaagcgactgccgacgccgctggcctgggccagttgcaggcgcagatcacgcaagtcccgacaccccacgctgcgcgcaaaccgtgacaacgtggccgtactgacctcggcccgttgcgacaacgcttccaggctggccgacgcggcaaaccccacgtcatccagcatcagcttggcgatacgcccttcgccggcgctgaaggcgtcctggcgagcgcggatctggtagaggatgtccatgggctctccgggttacaaaatacaggacagaccataagtcagaccgaaggcgaccaccgaaatcaacgtctccaacacggtccaggtcttgaaggtctggatcaccgtcatattgaagtattccttgatcagccagaagccgccgtcgttcacgtgggaaaaaatcaccgaacctgcgccggtggccagcaccagcaactcagggtgtggataacccaggcctagcgcgacgggcgctaccacaccggacgcggtggtcatggccaccgtggccgaacctgtggcgatacgcatcagcgcggcaaacaaccagcccatcaccaacggcgacaggtggaaggcatgggccaggccgagaatttcgttagtgacaccggcgtccaccaagatgcgattcaacccgccgcccgcgcccaccagcaaggtgatgctcgcggtcggcgccaggcattcattggtgaacttgaggatcgactcacggttgaagccctgtgcaatccccaaggtccagaagctcaccagggtcgccaccagcagcgcaatcaccgagttgccgataaacagcaggaactggttgaaaccggtgcccggcgtagagattacattggcccagccaccgatcatcatcagcaccaccggcaacaggatggtgcccatggtcagggaaaagctcggtaaacgggtacgcggttcgcgctcgatgaattggcgttccagcgggttttccgccggcagatgaatacgcggcacgatgaacttggcgtagaccgggccggcaatgattgccgtcgggatgccgatcaggatggcgtaaagcacggtctgccccaccgacgcgttatacgccagcaccgccatcatcgccgccgggtgcggcggcaccagcgcatgcaccaccgacagaccggcgaccatcggcagcccgaccatcaggatcgacacgccgaccctgcgcgccacggtaaaggcgatcggcaccagcaacacaaaaccgacctcgaaaaacagcggcagccccaccagaaacgcgatgcacaccattgcccaatgcgcgttacgctcgccaaaccggttgatcagcgtgcgcgccacctgctcggcaccgccggactcggccatcatcttgccgagcatggtgcccaacgccaccaccagggcgatatgccccaaggttttgccgacacccgcctcgtaggaacccatgatggtgtccgccggcatcccggccatcagcgccaggccgatggacaccagggtgatgacgataaacgggttgagtcggtaacgtgcaatcagcacgatcaaagcaatgatggcgatggcagcgtatgccaacagcccgaagcccggtgatgcggccatgcggtactcctcggaaagggtcacgtcgaattggttgtgaaactcataaatcattaccgaggattattttcaatttttatgaaagtaactttcgcccacaggtaagcgctgtcgcgttgggatatgcccgacaggcgtgaatgaaaattcgaggggtgttcttacatgaagatcggaggatgccggaaactcaagcgcagccgttgagtcttagaatgcgcaacccttcatcatcaggaaatcgaccatgattcgcacagccttcgccgccagcgccctgctcctcgccctgtgcggcaccgcttcggccgccgacaacccagcgctgaagaagtgcatggacagcgccaacaccaccgccgacatggttacgtgcaacgccaacgaagccaaggtgcaggacgcacgcctgaaccgcgcctacaagaccgccctcgccgcccaggaaggcccgcgcaagcagcaactgcaagacgtgcagcgcctgtggataaaataccgtgacgccaattgcgccttcgccggttccgccaccggcggcagcatcgaccgggtcaacggttccggctgcgtgctggacatgacccagacccgcgcccaggaactcgaagacctggtcgggccgtagtcagtcagtcgtggtgaaccctggcgcgcttgagcagcttcttgcaacgctccgacagatgcagcacccgcaggtgcttgccggccttgctgtagcgctcgcgcaaggtcatcaacgcggcaatcgccgagtagtcgacaaagctcaggtgacggcaatccagcgtcacctgggccgggtcgttggccgggtcgaactggttcaaaaacggcgtggtcgaggcgaagaacaacgtgccatgcaggcgatagagcttgctgccatcggcctccagatgctcatcggcatatagctcgcgcgcttgctgccaggcgaaattcaacgccgcaatcacgatcccgcacagcaccgccgtggccaggtcggtgaacaccgtgatcaccgtcaccgccagaatcaccagcacatcattgagcggcaccttgttgatcacccgcaaggaggcccaggcgaaagtctgctgggacaccacgaacatcacgcccaccagcgccgccagcggaatgcgctcgatgaacggcgacaggaacaggatgaacaacagaatcatcaccccggcaaacaccccggacaaacgcccgcgcccgccggagctgaggttgatcacggtctgtccgatcatcgcgcagccacccatgccgccgaacaggcccgagaccatgttcgccgcgccaagggccacgctttcacggtcggggtagccgcgggtctcggtgatttcgtcagtgaggttgagggtgagcagggtttccagcaggccgaccatcgccatcaggaacgcgtagggcgcgatgatgccgagggtttccagggtccacggaatctgcggcagcgccaaattcggcaggccgccggcgatgtgggccatgtcaccgagggtgcgggtcggcaggccgagcaggtacaccgccagccccacgccgaggatcgccaccaacgcaggcggcacggcgcgggtgatgcgcggcagcaggtagacgatggccatggtcaccagcaccaggccggtcatcacgtacaagggcgtgccgctgagccaggtttcaccacttttgaaatgctccaactgtgccagggcaatgatgatcgccaggccgttgacgaagcccagcatcaccgggtgcggcaccatgcgcaccagcttgcccaggcgcagcaggccgaaggcgaccatgatcaagccgcccagcaacaccgtcgccagcagatactccacaccgtgttgcaccaccagcgcgacgatcaccaccgccatcgagccggccgcaccggacaccatgccgggccggccgccgaacaacgcggtgagggtgcagatgatgaaagcgccgtagagccccatcaacgggttgaggtgagccaccagggcaaaggcgatgcattcgggcagcaacgcaaaagacgtggtgaggccggccaggacatcggcgcgcagacgggtgaggttcatgaagtaccagggtaatgcggggataaggcggggaatggtacggaattgagggagatggagctagtctcgaagaccgagtcgtgccaatcgggggcaagccccctcccacactagactgcactccatagttggaactcggtcaactgtgggagggggcttgcccccgatagcaacaccctggggatcaagtgaacatcacaccatttcgtggcgaatccactccaccaccgacgtacgcttcggcgcccagcccaacagttcacgggcctgcttgccgcgcacccggctgttggagcccaagccatagttggccatttcatagccccactcggcttcagcgtcggccaatggccaatcctgcggtttgcccaggttcagcgcttcggcgatggcggtggtcatgtcgataaacgcggcctcgctgctttccacgaagtagaaagtaccgggcacattcttggtcagagccaacaggtacaacgccaccacgtcttcgatgtgcacgttggaccagatgttctgcccggtgcccacgtggcgcactacgccgcttttacgtgcttgtttgagcagacgcggcaattgcacgctgtcgcgcttaacacccaggctgtggccgtagatcagggtgttgcagatcactgccgaattcacgccatcattggccgccgcgaggatcagattgtcgatggccacacgagccgccttgtcgaccgtcggctccggcaggttgccctcgaagtagatgacatcgctggccttgccgcccgacgcatccccgacaatgctcgaaccgctggtgtgcaggaacaccttgttcgagcccttcaacgccgcgagcagagtttccacggcagcacggtggtcgctgctggcggcgttgatcaccgcgtcggcctgttgcgcttgctcggtcaatacagccgcgtcatccagggtgccgatcaccgggttgatgcccagtgcggtcatctcggcagcctgctcggcgctgcgcaccaggccggtaacggtgtggccggccttaaccaggccggtcgcgatggaaccgccgataaaacctgctgcgccggtaatgaatacgttcatggaagactctcctggctgggtaagtgatggacccagtatcaaggcgtcatccctgacgaataagcccctggcgcccaattcactcttgcgctcaggtcacgaatcagcaggcataccgcgccagcttggcctggataaagtccaggaaacactggatacgcaacgccagctgcgagttgcggtagaacactgcgtggatcggctggcgatacccgctgttgaacgcctccagcaccggcaccaggcgcccggtctcgatatcgtcaatggtcatgaagttcgacaggcagcagatgccctgcccctccagcgccaactggcgcacggtttcgccgctggacgcggccacgccgggctggatcagccagcgatcgccctcaacatggcgcagcggccagtggttgagggtttcggtctgggtgaaccccaacagcgtgtgatcggccagctcggccaccgtggtgggcgtgccgtattgcttgaggtagccggggctggcgaggatatgcagcggcgtacagccaagagatcgcgcgtgcagggtcgagtcagccagggcgccgatgcgaatggcgatatcggtgctctgttccagcaggtcgatgatcacgtcatcgctgttcaactccaactggatatccgggtagaggctacgaaactcggcgatgtacggcacgatcccatgcagcatgaacggcacggcagcgttgacgcgcaggcgccccgccggtttctgctggcgtgatgacaggcgctcttccagctcttccatctgcgccaggatcaccttggcctgctcgaagaagtacttgccctcttcggtcaggtccatgcgccgcgtggtgcggttgatcagcgtggtgtcgagcttggcttccaggcgcgacaacgtgcggctgacagccgagggcgtctgcccgacttgctcggcggcggcggaaatcgaaccacattcaatcacgctgacgaagatctgcagctcatcggaccgggctttcacaggcgctcctcgttatcggttcagcgcagcttacaccgagaatttgaacacctgcgccagatgctgctcgtagcgcgccacgtcagcttcgatggccgggcgtttcatcacgtccacgcacaggaacgtgggcaggccggtcatgccgaggaactcgttggccttgtggaacgggaaatacaccgcgtccacgcccttggcttcgaagaagtcggtcgggtcgtcgaaggcttgctgcggcgcgttccaggtcagcgacaacatgtactgcttgccgtggatcaggccaccactgccgtacttctgcgaggcatcagaacgggtgcgaccgtcgctggcgtacaggctgccgtggccttcggtgaagacttcgtcgatgtacttcttgacgatccacggtgcgcccatccaccagccgggcatctggtagatggtcacatcggcccagaggaatttgccgacttcttcggccacgtcgtagccttcgtcgatgtgggtgaccttgacgtcgatgccagcacgatccaacgccgccacagcggtgtcatgcagggtagtgttgtagcggccatcggagtgagcgaactttttgccgccgttgagcaagaggacttttttcatggggtatccagaggggttaacaatgtctgccggcaggctatcgacattgccccctcggaataagcagcggtgaggcaaaatacatttgaccaaaaagcacgaatcacctgcgcattgttaaccactgatcagcagatgggcgcccagcaatgccatgccgatgaaaaatacgcgcttgaacaacaccgcactgatgcgctgacgcactacctgacccaaccacatgcccaatagcgccggcaccagcgccagcaacgacgcgttgatttcaccgccaccgagcgtgccgcgccaggccagccctgcggccaatgccagggtggacacagtgaacgacagccccagcgcctgcaccaactgatcacggttcaggcccagggcttgcagatagggcacggcgggaatcacgaacacaccggtcgccgaggtgatgatgccggtgatcaccccgcacacggggcccagccaacgttcagtcgcaggatttacgttgaacgtcggcaggaacaaaccgctcagcgcatacaccagcaacgccccgcccaacgcatggcccacccagcttcccccgctcatgcccagccacaacgtgcccagcccagtgcccaggaagatcagcagcagcatcggccacaagcgcctgagcaacgcactcaaatgaccaccggacgccagttgccacaggttggtgatcgtcgaagggatgatcagcaacgccgcagcctgcgtcggcagcatagccaggccgagcaagcccatggagactgtcggcaagcccaggccaatcacacccttgacggtgccggcgagcatgaaggtgccgatcaccagcagtgtcagggcggggccgatattttggtagaacgcgaggaaggtattcatggagtgattgtgcggtttttcgatgaggtcgaaaattcgccatatactgaggcagactcttgtttatacagaggctggtgccatgcactttgacctgatagacctgcgcctttacctgcacatcttcgacaccggcaacatcaccgccggggcggcccgcagccatttgtccctggctgccgccagtgcgcgtatccgggcaatggaggcttcgctgggtatcgcgtttcttgaacgtggccgccgtggcgttacccctacacccgccggcaaagccctggcccgccatgcccgcctgctgctgcaacaggccgagcacctgcaacaggaccttgccgaatacgccaacggcatcaagggccaggtgcgcctgctgtgcaacaccacggccctcagcgaatacctgccggagttactggcagactttttgcgcgaacaccccaacctcgacatcgacctgcaggaactgccgagcctgcgcatcacccaggccttgcgccagggcacggcggaccttgggatcatttccgacgcggtagacacccacggcctgcagaccctgccgtttcgcgatgacccgctggtgctgatcacaccgctggatcatccgttcaccgcagggagctttatcgatagcctgcaacacgactttgtgggcctcgccgcccacagcgcgttgacggtttacctcgaagaacaggcattgcacgcaggtttccgtctgcaaacacgcatccgcgccgaggggtttgacggagtgatccgtatggtcgcccgcggcgccggcctgggtatcgtgccccaggcggcactggagcgctggccgctggaacccaccttcaaggccccccccctgcaagaggagtgggcctgtcggaaactgctgctatgtgcgcgctcgttcgaacagctgcccggttatgccaaggccttgttcgacgccttggccctgcccttgcggaagaacccgtaatacaccgccgacaggatcagcaggaacggcacgccaaacaccagggtcatcttgaatgcctcggtgaaataggtggtgatcatcaccgcgcccatcagcaccagccccagcaacgtgctgtagggaaacagccgcagttggaacgacaatttcggcccaccgtgacgcttgcggtagcgccggaagaacaggtgagtgaggaagatcatgaaccaggtgaagatcgcgccgaacatcgagatcgccatcatcagggtgaacgagctttccgggtataccacgttgagcaacgtcgccagggcgatgcccgagctggacagcagcaacgcgttcagcgggatgccgctcttgctcaaggtgcccatggacttgggcgcgaagccggcacgggacaggctaaacatcatgcgggtagtgatgtagagctggctgttcatggccgacaacgccgcgatcaggatcacgaagttcatcacgccggtagcaccgggaatgccgatggtctgcatcaccgtgacgaacgggctctgggtctgcccggcctggttccacggcacgatggccagcatcagcgccagggtcagcaggtaaaacaccaccaggcgcacgatggttgcacggaaagctttcttcaccgcctgttccgggtcggcggcttcaccggcggccacggcgatcatctccacactcaggtagctgaagatcgacacgatcactgcgatccacatgccgctcaggccatgggggaaaaacccctcgtgggccgtgtagttctgcacgccgtactccgggttgccggaaccgaacaccacgtataccgcaaggatgatgaagccgacgatggcgctgatcttgatcgtcgagaaccagtattcgaagttgccgaaggtcttcacgctgatggcattgagcaggatcagcacactggaaaacgacacgatccacacccattccggcacgttggcgaaccagtacttcatgtacatcgccaccgccgtaacctcggcgcccaccgccagcacaatcgccgcccagtaggcgtagcgcaccaggaagccggccagcgggctgatgtagaactcggcataggcgccgaacgagcccgaggtggaatgcgccaccgtcatctccgccaggcagcccatcaacagcaaggtaatcaatgcgccgatggcgtagctcacaagcacgctgggcccggcatacccaatcgcataggcgctgcccatgaacaacccggtgccaatggcgccaccgatggcgatcatgctcatctggccggaagtgagctggcgcctcaggcccagttcgcggtgggtgatctcggcaaagccggtgtctggcgtggtcacgtggtgtgcccctttattattgtgattgcactattgaacggttgtcacagattccctgtgggagggggcttgcccccgatagcggtggatcagtcaacgctgtattggctggcacactgcaatcgggggcaagccccctcccacatttttatctgcgttgtggtcaggtgacgctgttgcggactttgaattgcgcctggtcccaggtgcggttgtcgaggatttcacccaggatttccacagcgtcaaacacctcggtaaagcttgtgtacaacggtgtaaacccaaagcgcatgatgcgcggttcgcggtagtcaccgatcacgccacgggcgatcaaggcctggatcaccgcatagccttcggggtgttcaaagctcacatgactgccgcgccgggcgtgttcacgcggggtgatcagcaccagttcatgagcagcgcaacgcgcctcgaccaatgcgataaacaggtcggtcaacgccagggatttgctgcgcaaactcgccatatcggtctgggcgaaaatctccagcccacattccaccatggccagcgaggtgatcggctgggtgccgcacaggtaacgcgcgatgccggcactcggtgcgtacgtcgactccatggcgaactgccgggtgtggccgaaccagcccgacaatggctgtcgcaccacatccaccagcgccgggttgacccacacaaacgcctgggcgcccgggccgccgttgaggtacttgtaggtgcagccaatcgcatagtcggcaccggcctgatgcaggtcgatgggcaccgcgcccgccgagtgcgccaggtcccagaggctcagcgcgccgcactcatggctcagggcggtcagcgcctgcatgtcgtacatgtagccggtcttgtagttgacgtgggtgagcatcaccaccgccacatcctggtcgatggcctcgggcaattcatccgggctgttcaccaggcgcagggaatagccttgttgcagcagttcggccaagccctcggcgatgtacaggtcggtgggaaaattgctcgcctcgctgacgatcactttgcgatttggctggcgttggcgctgtacgctcaacgcggcgctgagcaccttgaacaggttgatcgaagtggtatcggtgatcaccacttcgccgtcgcccgcgccgatcaatggtgccaggcggttgcccaggcgctgggacaggtccgcccagccagcactgttccaactgcggatcaggccattgccccactcttcggcaatcaccgcctgagcccgtgccaatgccttcaccgggcgggcgccgagggaattgccgtcgaggtagatcaccccctccggcaacgcaaactggcggcgcaatggcgccagcgggtcctgatcgtcgagggcttggcagtggcttcgagtggtcatgggttgtcctggtttttataggtaaggatggaccaaataatgaacgaacttttagagaattttcgtgcaaagtggcgggcaacaggctaattaagctgtaggaaattcgaatttaacccccaaacacgcggatttattctaaccatgattctcgacgccaccgacctgcgcctcctgcatttcctgcaacaggatggccgcatcagcaatcaggaattggccgaaaaagtcgcgctgtcaccgtccgcgtgcctgcgccgtctgcgcctgctggagagcgagggcatcatcagcggctaccgtgcggtgttgaacgcggagcagttggggatcgagctggaggccatcgtgcacctgtcgttgcgccaggatgtggaggattggcacgagacgttcatcaagaaggtgcaaggctggccggaggtcgccagcgcctacgtgatcaccggcgccagcaactatgtgctgcgggtgcaggcgcgcaacctcaagcacttttcggactttatcgtcaaccacctgaaccgcacggcgggggtgatggatattcgctcggagattgtgttgcagaagatcaaggatcgggatgaggtgctggacttggtggtacgcaaataaccgcaacaccatcggtcaaatgtgggagggggcttgcccccgatgagggagtgtcagtggctgaactgttcaatgacacaccgctatcgggggcaagccccctcccacatttttgaatcgcgtttaatcttccagagcgcggactcgctgcatgcgtttctgctccaccggcgcctccgccacctgcagctcaaagtcaaaatcgatctgcgcaaaccgcccttccacgccaaactcctgcgccagttgcgggtcgtcgctgaagcgaatctcggcgatcaactcatcccgtgtcgcataggcaaagtcatcatgcaggtacgggtcatccgaaaggttgatctgcgtggtcaggtgccgatgccccggcgccgaaatgaagaagtggatatgcgccggccgctgcccgtggcgcccgagctgatccagcagttgctgggtcggcccggtcggtgggcaaccgtagcccgacggcacgatactgcggaaccggtagttgccttgggcatcggtctcgatgcgtcggcgcaggttgaactccgattgcgtcggatcgaaccacgagtaagtcccccccgtgttggcctgccacacgtccacaatcgccccggccaacggtttgccgttggtgtcgcgcacctgcccgcgcatgaacagcggcaccgcgtcgtccttgccatcgtccagccgcgcctcgacctttgacagcggcgccccggccacatacaacggcccttcaatggtgcgcggcgtgccgccggatttgccggcttcctcatcggcggcgtccatcagcaagtccaggtaatgctccaggcccagcccggcggcgagcaatccggcttcctggtgcttgcccaactcgttgaggtagttgaccgccttccagaactcttccggggtcacttccaggtcttcgatgatgttcacagtgtcacgcaggatccggtagatcagcgccttggtacgcgggttaccagcgtcgttgaggttgccgctggcttcttcgagaaactgttgggcatgggcagtctgggacagtcggatggacatggtgcattcctcatcttgtagttattcgtttggaaaccggcctagcggtcgtcgtcatggatcgacgacgggtgccggcacagggcgttcacttcgatagccatgtaggggaacagcggcagttgcatcagcaggtcatgcagtgcctgcacgctgtcgacatcgaacacgctgtagttggcgtagtgcccggcgatgcgccacaggtggcgccatttgccttcctgttgcaggcgctgcgccagggccttttcatcggccttgaggctggctgcacgctcggggttcatgtcgagcggcaggttcacagtcatttttacgtggaacaacatggcaggcgcctcttagtgtttgtcacgacggaagaacgccaggcgctcttcatcgatggccaggcccaggcccggtgcggtggagacatgcagctggaaatcgcggtacaccggcggttcggtgaggatgtcttcggtgagcagcaacgggccgaaaagctcggtgtcccacgccagtttgttcagcgtaaggaacgcatgggccgacgccagggtgccgatgccaccttcgagcatggtgccgccgtacaggccgatacccgccgcttcggcaatcgcggcagtacgcaacaccgcacgcgggccgccgttcttggcgatcttgagggcgaacaccgacgcagcgccttcgcgggccaggttgaacgcgtcctcgacacactcgatggattcatccgccatgatcggcgccgggctcgacaggttgagccgcgccatgccgctgcggttattgcgcgagatgggctgttcgatcaggtcgatgccattgtcgccaagcaccttgcacgcccgcagtgccaccgcttcgtcccaggcctggttgacgtcgacgcgcacgctggcgcggtcgcccagggtctttttgatcgcgatcacatgggccaggtcgtggctgacttcaccggcgccgatcttcaatttgaagaggcggtggcggcgcaggtcgagcatcttttcggcctcggcaatgtccttttcggtgttgccgctggccagggtccaggccaccggtagcgcgtcgcgcacacgcccgccgagcagctcgctgaccggtaggcccaggcgtttgccgagggcgtcgagcaaagcgctttcgataccggatttggcgaaggtgttgccacggatgctgcgctccaggcgcaacatggccgcgttgatgttgctggcgtcctggccgatcagcagcggcgcgaagtgacggtcgatgttgaccttgatgctgtcggggctttcactgccgtagctcaggccaccgatggtggtggcttcgccgatgccttcgatgccatcggcgcagcgtaggcggatgatcaccagggtctggttttgcatggtgtgcatcgccagcttgtgcgggcggatggtggggaggtcgacgataatcgtctcgatcgactcgatggcgcaaatcggcatggcaatacccgttgggttctttattggttttagccgattctgtgccgtatttttcaaggcttccaatatagaatgggtctcgcacaataccctaaaggtatcaaaggagccgtcatggaactgcgtcacctgcgctacttccaggtgctgggagaaaccctcaacttcacccgcgccgccgaacgcctgcacatcgcccagccgccattgagccggcagatccagcaattggaggatgagctgggcgtcattttgcttgagcgtgggcgaccgctgcgactgaccgaggccgggcgttttttctatgaacacgccaacgtgctgctggagcaattgaacaaggtctgtgacaacacccggcgcatcggccagggcgagaagacgtggctgggcatcggttttgcgccgtcgaccctgtacggcgtgctgcctgaattgatccgccggctgcgtacccatgaggcgttggagctggaactcgggctgtcggagatgaccaccttgcagcaggtcgaagccctcaaggccgggcgcattgatgtggggttcgggcggattcgcatcgatgacccggccattgtccaacgcgtgctggtggaggaccggctggtcgccgtcctgcccgccggccacccgttgcttgatgcgcccgccaccctcgcccaactggctgccgagccctttgtgctctaccccggcaacccacgccccagctatgccgaccatgtgatcgcgctgttcgacgcccacggcctgagcctcaaggtggcgcagtggaccaacgaattgcagaccgccatcggcctggtcggcgccggcatgggcgtgacgctggtgccggcctcggtgcaagtgctgcaccgcgcagacatcggctacacaccggtggtggaggccactgcgacgtcgccgatcattctcagccgacgggtaaatgaccagtcgccgggtctcagtcattgcctgcaactggtggaagagttgatctagccacgcaggcgccgcgcatcgttgcgctgcaaggtctggctcggcgactcatcgaacagcttgcgatactccgccgagaaccgcccaaggtgagtaaagccccagcccagggcgatttcggaaatggtgcgggtagagccgtgctcgaggatttcctggcgtaccgcgcacagccggtgcttcttcaaataggccatcggcgacagggcaaaatatttgcgaaacgcatcgaacagcttgaaccgcgacacccccgcagcagcttccaggtcttccaggtgcacggtgtcccgagcgttgtcatggatgtactgccgcgcacggatcaggtaatgcggcagtttcacgccgaggacatcgcgcaattcttcggagtagttgttcggctgggccaggatcaggcctttgatcagcgagctttccaggtcgcgggtaaaggcggcctgctcgtataactcgctgccgtgttccagctcggcgatgaagtagcgcgccatgcgccaccaggatgccgaagcaccgtccacggcgtccatcaccgactcaaagcgcagcggcgcctcaatcggccgttgcagcaaaccttccagtgattcactcatcgccgcccgcgtgatcaccacctgcagcttgcggcaatcaccggaaatcgccagcacctgatgctcgttgggcgagatgatcacaccctgatcgcggttggagaccaggcgctcaccgttcgtgctcaactcctgctcgcccaccaacggcaggctcaagctgtagctgctgaagtgctcggcgtcttcgatgtcgatggtcacgtcggtgccgtattcgatcacgcccagggtagtggcgcgggacttgaacacgttggcgctgtggtgaaagcgcaggcgctccggcgtattggtggccaggcgatggggcccgcaaatgcccgacatccagctgcgggcgccttccaggtcgaagcgttgaatcgtttggctgctcatcagggtgcacccacggcggttaggctgttgcgcgctctggcggcgcgtcgttgttgttcgacagcaaataatgcgccacgccggcgcaatggccagcgggtggatagcaatagtcgactaagtggataaaccaccggtttttccggccattgccctgcaagacagtagcgcatcccgtcaccttcctgcaccgggttgggtatttgctgcccaattatccggcgcaggttcccccactaagcggatagcccgcaccctgcaccactgcctctaataaaccaccgattagcccctatcaaaaaggtgcctcccatgagtggtgcaagaagcgtcgagcagtggaaaacgtttatcgaaggttgcctggactttcgcccggtggatgaagtgtttcgcatcgcccgcgacatgttcaccgagccggaactgttcgatctggagatggaactgatcttcgaaaagaactggatctacgcctgccacgaaagcgaactggccaacaaccacgacttcgtgacgatgcgcgccgggcgccagccgatgatcatcactcgcgatggcgaaggccgcctcaatgcgctgatcaacgcctgccagcaccgcggcaccacgctgacgcgggtcggcaagggcaaccaatccacgttcacctgcccgtttcatgcctggtgctacaagagcgatggccggctggtgaaggtcaaggcaccgggggaatacccggagggtttcgacaaagccacacgcggcctgaaaaaggcacgcatcgagagctacaagggctttgtgtttatcagcctggacgtaaatggcagcgacagcctggaggatttcctcggcgacgccaaagtgttcttcgacatgatggtcgcgcagtccgccaccggtgagctggaagtgctgccgggcaaatccgcctacacctacgacggcaactggaagctgcagaacgaaaacggcctggacggttatcacgtcagcaccgtgcactacaactacgtggccacggtgcagcaccggcaacaggtgaacaccgagaacggcaccggcgccggcagcaccctggactacagcaagctcggcgccggcgacgccaataccgatgacggctggttcgccttcaacaatggccacagtgtgctgttcagcgacatgcccaaccccagcgtgcgctccggctacgccaccatcatgccgcgtctggtgcaggagcacggccagcaaaaggccgagtggatgatgcatcgcctgcgcaacctgaatatctacccgagcctgttcttcctcgaccagatcagctcgcagctgcgcatcatccgcccggtggcgtggaacaagaccgagatcatcagccagtgcctgggggtgaagggcgagtccgacgccgaccgcgaaaaccgcattcgccagttcgaggacttcttcaacgtgtcgggcatgggcacgccggatgacctggtggagttccgcgaagcccagcgcgggttccagggccgcctggagcgctggagcgatatctcccgtggcagccaccgctgggcaaccggccccacgcccaacagcgaagccatcggcattcaaccggccatgaccggcaccgagttcacccatgaaggcctctacgtgaaccagcaccgcaactggcagcagttcttgctcaacggcctcgatcaacaagcgctgaaactgcgggaggtgaactgatgaatgccccattgcagtaccggatcgagcagttcttctaccgtaaatccgagctgtgcgacgcccaggactgggacgcctatgtgcagctgttcgacccgcagagcgagttccacctgccgcaatgggactcggagcacgtctacacccgcgaccccaagcgcgagatgtcgctgatctactacgccaaccgctcgggcctggaagatcgcgtgttccgcctgcgcaccggcaaggcggcatcggccacaccgatgccgcgcacgctgcatttgatcaacaacgtgcgcatcgccgaacaggcagatggcacgctggaggtgaagttgaactggcacacgctgttctatcgcctggccacgtcagagcagttttacggccacgccacctacaccctgaaacctgaaggcgacagctggttgatcacccgcaagcatgcgttgctgctcaacgacaccatcaactcggtgctggatttctatcacctttgacagccgactgtgacttgtagtgagcgggcttgccccgcgctgggctgcgcagcggccccaaaagcttgggagcgctgcgcactccagcgcggggcaagcccgctcactacagttataaaatccatggagaacggtggatgaatcacaaagtagccttcagttttgccgacggcaagaccctgttcttccccgtcggagccaatgaaatcctgctggatgccgcgttgcgcaacggcatcaagatcccgctggattgccgcgaaggcgtgtgcggcacctgccagggccgttgcgagtccggcgactacagccaggattatgtcgacgaagaagcgctgtccagcctcgacctgcaacagcgcaagatgctcagttgtcagacgcgggtgaagtccgacgcgacattctatttcgactttgattcgagcttgtgcaatgcgccggggccggttcaggtcaagggcaccgtgagcgcggtggagcaagtgtcggccagcacggcgatcctgcaggtgcagttggagcaggcgctggactttttgcccggccaatatgcacgcttggcggtgcccggcacagacagttggcgctcgtactccttcgccaacctgccaggcaatcaactgcaattcctggtgcgcctgctgcccgatggggtgatgagcaactacctgcgcgagcgctgccaggtcggcgatgaactggtgatggaagcgccactcggcgccttctacctgcgccatgtcaccaaacccttggtgctggtggcgggcggcaccggattatcagccctgctgggcatgctcgatgaactggccgtcaacggctgcgaccagcccgtgcacctgtactacggcgtgcgtggcgcagaagacttgtgtgaagcggcgcgcatccaggcctacgccgcgaaaatcccgggctttcgctacaccgaagtgctcagcgcgccctcggacgaatggcccggcaaacgcggctacctcaccgcgcatttcgacctggccgaattgcgggacagatcggcggatatgtacctgtgcggcccccctccaatggtcgaatccgtccaacaatggctggcggatcaggcacttgatggcgttcagttgtattacgaaaagttcacgcagagtaatatctgaccctcagcacttctgaggggtagatgcggcgtgcactccaccctgagaaaaacaagtagaagggaatgttaatggcggatgacatggttaacccggtgggcctcaagcgtggcctgaagaaccggcacattcagctgatcgccttgggaggggcgatcggcacggggttgttcctcggctcggccggggtactcaagtcggcggggccgtcgatgatcctcggctacgcgattgccggttttatcgcgttcctgatcatgcgccagctcggcgagatgatcgtcgaagagccggtggccggttccttcagccattttgcgcataaatactggggcggctacgcaggcttcctggccggctggaactactgggtactctacgtactggtgggcatggccgaactgacggcggtgggcaagtacatccagttctggtggccggagatcccgacctgggtcagcgcgctggtgttcttcgtggcggtgaacctgatcaacaccctcaacgtgaagttcttcggtgaagccgagttctggttcgcgatcatcaaggtggtggcgattgtcggcatgatcgtgctcggctgctacctgctgttcagcggcaccggcggcccgcaagccacggtcagcaacctgtggagccacggcgggttcttccccaatggcggcatggggctgttgatgtccatggcgttcatcatgttctcgttcggtggcctggaactggtgggcatcactgccgccgaagccagcgagccgcgcaaagtgatcccgaaagcgatcaaccaggtggtgtaccgcatcctgattttctacgtcggcgcgctgaccgtgctgttgtcgctctacccatgggaccaactgctgcagacccttggcgcgtcgggcgacgcctacagcggcagcccattcgtgcagatcttctcgctgatcggtaacgacaccgccgcccacatcctcaacttcgtggtgctgaccgcggcgctgtcggtgtacaacagcggcgtgtactgcaacagccgcatgctgttcggcctggccgagcaaggcgacgcacccaaatcgctgatgaagttgaacaagcaaggcgtgccgatccgcgccctggcgatttcggccctggtgacgatgttgtgcgtggtggtcaactacgtcgcaccgaagagcgcactggagctgctgtttgcgctggtggttgcctcgctgatgatcaactgggcgctgatcagcatcacccacatcaagttccgcaaggccatgggcgaacaaggcctgacgccgtcgttcaagaccttctggttcccgttcagcaactacctgtgcctggcgttcatggtgatgatcatcagcgtgatgctggcgattccgggcatcagcgagtcggtgtatgcgatgccggtgtgggtggggattatctacattgcctatcggctgcgggttcgcaggagccacgcggtagtcaacgcgcagtaatgcctgtgggagggggcttgccccctcccacattttgtttacagcgtggagcgtactcgccacaactcggggaacagcacggtgtcgagcatcttgcgcaaataccccacaccctccgtgccacccgtgcccggctggaagccgatgatccgctctaccgtcgtcacatggcggaagcgccactggcggaacgaatcctccaggtcgataaacttctcggccaattgatacaggtcccaataacggttcgggtcgcgatacacctcgcgccacgccgcctccaccgactcatcgtgaaccgtcgccgccgtcgggtcgcgctcggcacgtttcggatcaatcgccaggcccgccttgatcatcaggttgatcgcctcgtcatacagcgacggcgtggcaatcgccactttcaactcgttcaacagctccggccggtgggcatggggccgcaacaacgccgcgcttttattgccgaggataaattcgatctcacggtactggaacgactggaaccccgacgactggcccaggaacgggcggatcgccttgtactctgacggcgtcatcgtggccagcaccgcccaggcgtgcaccagttgatcgaagatccgcgacacccgcgccagcatcttgaacgccggtggcagctcgcccaggcgcacgtgttcacgggcggccttgagctcgtggagcatcagtttcatccacagctcggaggtctggtgctggatgatgaagagcatttcgttgtggtccggcgacagcgggtgctgggcgctgaggactttgcccaggtccaggtaatcgccgtagctcatggactcggaaaaattcagttcggcgttatgccattcttccggaggttggtaatcggcagagaagggacattggctcatcgcgtgggctccttgagcgggcggagaatggcgcggacagggctcgcgtcgaggttggcaaaacgcagcggcagggcgatcaattcatagtcgccctcggggacgtcatcgagcacgatgccttcaagaatcgccatgccatggcgcgccacggcgttgtgggaatccatggtcttggactgctgtgggtccagggatggcgtgtcgataccgatcaagcgcactcccaggctggcgagcaactcgatggtctgtggggcgatggcggtgaagttcgaatcccattcggtaagcggcgcttgtggataagtacgcagcaacacacgctcgggcacgttatccacacggccctccaactgatgcggctgcaccagcgcgccgctgtccaggcaatgcagcacgcggcacggccccatatacacatccaacgacacctcaccaatggccgcgccgtccgcgctgtaatgcagcggcgcatccacatgggcgccggtgtgcggcgacaaggtgatgcgcccgacattcaccggacattccgggccaaactgccatacgcgctcttcctggaacggcgtatcccccggccaggtcggggtcgccgtactcaagggcgggctgatatcccaccacgtttttattgggttcatttgcaggctctcggcggttactggggtgaatgatacgagggccggccgcgaattttcttgcgaattctggcgtgaagggggaaatctttcgcacttattgcgaggaaatagcggattggtgatgggttatatcaaataaacaccgctgcgcttctgggcatcccgatgtcgagttcagaccactgacgcaacgccccaggccttagtgtggatccttccattccctgcctcggaggcatcatgtccaagcccatcaccgtactgcgcgacacccaccccctgccggtcctggacgcctgcaaatgggaaaagctcgaaggcgacccgcacaccgtcaacctcaacgcctacaccagcgaagacggcagcaagatcatgggcacctggatctgcacaccgggcaagtggtacgtggattacgtgaagtgggaatactgccatttccaggaaggctactgcatcatcacgccagaaggcatggagccgattcacttgcgcgctggggatatctttgtggtggaaccagggatgaaggggacgtgggaagtggtcgagacggtgcgtaagtattttgtgtttgcttgaactggcaatccgctgatttcaagaacagaaaaccgcctgtaacggcggttttttgtgcgtttcagcggctcttgccagccaaggggcctgtcggctccatgtctttaccatgctcaatagctacgctgaaaaaccttttttgattggcagacgttgggccgccaagcttcttggcttcggcgcaaaacgtctcgacccattgcgtgtctgatttctggtttgtcgctttcattaacccaagcctctgtgagccttgtacatgcgcccaatactaggtgcgctcaactgaaatcacaaggcggtgcttttcgtcataggtgaagccaagtcgcttatacgtctgtacgacgtctggtcgtggctcctgaatttcgattcgagagcacccgatgacacgcgcgtatgcgtcgatggcgccgagggcaagcgcagcgatcaagcctttcaagggatgttcgctatctgagttaccttcgagaagcacaatcttgatcgtgactttactgtcacgaggcgttgcgtaacagaggccacatagttgctcatcgtgccagatcgacaaatcaaaccctttagcgtccaaggccctccaggccggaacatcctcccagggaaattgggcgtcacctccccagaggtaaaacgcctctatggcccgaccatcaatcacatcgaagcgtactttcgcagcgtcgagccactgatggcccaatgcattccactgctcgatgaatgaagccagtgccgcctttctcgattgagattgaaagaccaggtacttgagggagttcgagtatcgacgtgccattacgatcagattcttacgagtagagtggaaagatcagaaagccgcgttaacaacgaaagggcgcaaaccgtagcaagatcgggtgtagccttgggccaacgatgaattcaagatttttcaggcgtattcgtcacgagcaatggagccctccccatgacggctgaattcgacaggcaaaaaatcgtcatcttcaccggctctggcatcagtgccgaaagtggcctggacacgttcaacgacgaaaccggactgtggatggaccatcgcgtcgaagacgtcgctacgcccgaggcatggcatagacaccccgcggacgtgctcgcgttctataacgcgttgcggcacaaggcgtgggctgcgcagcccaatgcggcgcaccgcgccctagcggagttggagcagcagtttgatgtagtggtgattacgcaaaacgtcgacgacctgcacgaacgggcagggtccacgtgtgttctgcatctgcatggtcaaatcaacctggcgcaaagtacggtcgacgagcaactgatttacaagatcgacgataagccgatcttgctcggcgacacctgtgaaaaaggcagccaattacgcccgtatatcgtctggtatggcgaaaatgtgccaaatatcgagaaggcgctgcagcactttaaaaacgcagagaaagtgctggccgtgggcacatcactgaccactcaaccggccgcaggcttggttacgaaagccaggcactctgccgaaaaggtcctgattggactggctgtttcgcgtaagccctacggctacgaattcatgcgaggaaaggcatcaagcctggtgccttatgtggtgggatgctggctgaaaggccaaaaggctcgttaaccgcaaaaacccgggggcccactgaaggcaggctcccggaaacgcccctacttgggcttgcgatagctgttgatgatcgccgaaaagtccttgcccccttccccgcgctggctcatcgattgatacaactgttgggccacggcgcccaggatcacgggttgcttcgcctgacgtgccgcttcggtagccaggcccaaatccttgagcatcaggtccgcaccaaacccaccggtgtagccacgcgacgacggcgccgtttcgatcacgcccggccatgggttgtaggtgtcggaactccagcaacgcccggtcgagctgttgatgatccccgccaacacctgagtatcgatgcccaacgcgtcgcccaatgccatggcttcgctgacgccgaccatgctgatccccaacaacaggttgttgcagatcttggcgatttgcccggtacccacctcaccgcagtgcacgatgttgcggcccatctgcgccagcaccggttgcagggtagcgaacagttccggggtggcgccgaccatgaaagtcagcgtcccagcagcggcgccaccggtgccgccggagactggggcgtcggctacggttacgccttgcctggccgccgcagccgctacgtcgcggatggtttgcgggtcgatggtgctgcaatccaccgccggtacgcctttgccgatgccggcgagtacaccgtcttcattcagccatacgctgcgcacatgggcggcggcgggcagcatggtgatcaccagctcagcgtctttcgccgcatcgcgtggtgaatcgctgatggtgccgcccaactcggccaattccttgagtaccacctggttcaagtcgaacaggttcagcgcgtgacctgccttgatcaggtttcgggccatgggggcccccatgttgcccaagccgataaatgcaatcttcatggttgtctcccggaatcagcgcaggttgatggtggtgttgacgccatcgttgaccgtgtcgtcatcgaaccagcggctggtgacggtcttggtctgggtgtagaactgcaccacttgcttaccgtacgggccgaggtcgccgagcttggagccccgggagccggtgaagctgaagaacggcaccggcaccggaatcgggatgttgatgccgacctggcctacatcgatttcgctctggaatttacgcgccgccgcgccgctctgggtgaacaggccagtgccgttgccgaacgggttggcgttgaccagggcgatggcttggtcgagggtgtcgacttccagcaccaccagcaccgggccgaagatttcctcggtgtagatacgcatatcagtggtcacgcccgagaacagggttgggccgacaaagttgccttgctcgaagcccggcaccttgatgtcgcggccgtccagctccagcttggcgccttctttcacgccgctttcgatcaactccaggatgcgtgccttggcgcgcctggaaatcaccgggccgacatcggtgccggcctcgctgcccgcgttgaccttgagtttctgcgccagcgccttcagatccggcagccattgcttggacgcacccaccagcaccaccaccgaggtagccatgcaacgctgacccgccgcgccgaaaccggcaccgaccagggcattgagggtgtgctcacggttggcatccggcagcaccaccgcatggttcttggcgcccatcatcgactgcacgcgcttgccatgtttgccagccaggtcgtacacatgggtgcccactgccgtcgaaccgacgaaggacacggccttgatgtccttgtgggtgcacagcgcatccacgacatccttgccaccgtgcaccacgttgagcacgccagccggcacaccggcttccagcgccagctccaccagcagcatggtcgacagcgggtcctgctcggacggcttgagcacgaaggtgttaccgcaggcaatagccatcgggaacatccacagcggaatcatcgccgggaagttgaacggggtaatgccggcgcacacgccgatgggttggcgcagggtgtaggtgtcgacaccaccggcgacattctcggcgaattcgcccatttgcagggtgccgatggaacacgcgtgctccaccacttccaggccacggaaaatatcgccttcggcatcggcaatggtcttgccctgctcgttgctgagtaccacggcaatgcgcttggaatgttcgcggatcaaggcctgcagcttgagcatgatgcgcatgcgcgcgccgatcggcgtcagcttccaggtctggaaggcgcggtgggcggcgtcgatggcggcgttgacttcatcggcggtggcgaacgggactttggccagcacctcttgggtggcggggttgacgatgtcttgccactcggtggtcttggactcgacccactcgccgttgatcagcaacttgacctgttgcacggaaatatcggcagatgcgttcatgtggtctccaattcttatttatatgcagagaaccaaggccaggggtgtgctctcaatagctgacggtcgcgcccgcgtcccagcttaaatcgggttcagcctcaaatatcttcattcgggacttggccctgcgggttggagctgtgatcacaccagtccgcgttgcgggactcgaagaggcaaaggcatcctcttcgtcccgcgccttgactgatgcgatcacaactccaacgcgatccgccatctattgagagcacacccctatcgccttgaagaatgaggcgttcggactgtttttggagtatagatgtgcaaatctctaataagaacgcacataaaagccggaccaatatgcaaaaaaacatcacgtcgctgggctccctgaactgggatgacctgaagtttttcctcgaagtggcccgcacccgcaaggccagcgtggccgccaagcgcctggcggtggactacaccaccgtgtcgcggcgcatcagttcactggaagtgtccctcggcaccctgctgttcgaaaaatcccggaccaacggcttcgtcctcaccagcgaaggccagcgtttgctgggctacgccgagtccatcgaaagcaccctgcacatggcctgcgaacaagtctccggctccggcgtggcgctgtccgggcacgtacgcatgggttgcaccgaagggttcggcagcttcttcgtcaccccgcaactgagccacttcgtcgacacctacccggccatctcggtggacatcctgcccctgccccacttcatcagcctgtccaagcgcgaagccgacatcgtcatcgccctggagcgcccggaacacgggccgtatgtgtgctgcaaactgtgcgactacaagttgcagttgtacgcgacccaggaatacctggaccaacatccgcccatccgcaaaccttcggatttggccgagcatccgtttatcagctatgtggatgatctggcgttcagctcggagttgctgtacctggcaaacgtagtgcccggggccagtgccagtttgcgcagcaccagtgtgatcgcgcagtacgtcgcggcgcagcaagggcggtcgatggcgatattgccgtgctttctggcggcgcaggatccacggttgttaccggtgctgggggagcagatttccatcactcgccagttctggatgtattgccgggaggatctgaggaagttgaagcggattacgttgttgtgggactacatcagggaggtgacggagcagaatcaggggctgttgatgggggagacgcgggagatgcggtttgaaagggaccaagcaatagagaaacactgatcattcaaatttcgcgccacccgccaaaccatggcaattcgcctccatagctgataaaaagcagattactaaggaggaaaactgtgaaaatcaccattaagaaagattacaaatctattcctgcaggagttgagtttgacatcccagacttttgtgttttgacaggaaaaaacggcagtggcaaaagtcatatcctcgaggctatcgcaaacccaacactctcagatgtaagcctaaatggagcgagtacaaacaagatattacatgtagggtttaatggcctaaacccacaagtagacgagcaatgcgactcaacccaagtactgcaaaacgttaacaactggtggaaccagatacttggaattatcacacactacaaacagatttcacaaaacggccaaagattcaacaatatatttactgaatacttaccccagcacggccccaaccctgtcttatactcaataataaaacaaataatggaaaagtcaggaaaaaacctagaaaatctaaaccaggaggacgttctaaacaatattagcttcgtcgaaaccagcaacaacaccttgtttttttcccaatgcgcgatgatctttaaggcatatcacactagacaggtaaagaatgagttctccgaattcagagccgcaaaacatagcggtactggaattcactttctcagccaaaaagatttcatatcaaaatatgggcctcctccatgggaactcatcaatgagatactagcccgagcaaaactaccctatgaagtgtcgaaccctgaacttgtagattacgacctcccttatcaacttagacttatcgacaaatctaacaacgtagatatttcggtcaacgacctttcatctggcgaaaaggttttaatgtcgttagcattagcaatttacaacacacaagaaggaggaactcgcccagacatcctgctactcgatgagccagatgcacccttgcacccccaattttctaaacttcttatagatatactcatcgagacaatagtgaggaaaactggcgtcaaggtaattatcacgacccactcgccctcaacagtcgcgatggctccagacaacagcgtgtttgaaatcaatagagacactaaagtcccattcatggttagcaactcccatgcagtcaatacattgaccgaaggaatagacttcctaaaagtatcattcgaaaagagacggcaaattttcgtagaaagtaaatatgacgtccaatattttgagcgccttttcaaccttgctcggcgtagatgtgatttttcataccatccaattttcttagagcctcatagtggatcatcgaactgcaccgatgtcatcagcatagttaacagactatactcaacaggaaacgatctcgtttggggaattattgacttcgataccaccaatacaccatcagacagaattgaagttcttggaaccggaaaaagatacgcagttgagaactatattttagatccactctatgtgtgtttaagcctaatccgatcagcaaaaaaaacatatgcagactttggagtaacaggaagcgttgcgacgtatacagaagcgatgaacctcaaagaagaagagtgccagacgatagtggacaacttcttaactcaaatcaatcttccgctagccgaacttactcccacccgactagataacaattacaccatcaactaccctaaatcttttctattacatcaaggacacagctacgagactctactaatgaatcgtttcccagaactgaagtcaatatctcgaggcaatggcgattcagcattgaagttaggagtgatgcagacagtcgaagagtaccctcagttccttcctagagagatcttcgaaaccttttccagagtcttaaatgattagtagctcaagcgttggtagcagacaagtgaagctgttaatacctaaagtcagatacctcaagaaaattccctttaaattgcaggatatttcctagagaatctccacagtattgcgtcataggatttgagtgtctagcctcctcgggtcgctgcaaacagcgactgggtttagcgacccgagaaacgtaggttcgacctcctcaactcatttggccggcgtttttgcctgccttatcgtgttatggcggctgtgcgcgggagaccttcggggtctaccgggttccctaggttaccggttcgctaacctgcgtacagctgccacctctccatgtttagcgacgtgccgtggcggtttctacttgttaacctaaggaaaaaccatgtccaagatcgtccccgatccaccgctttcctccctcaccaccctcggcgtcgtcaccttcggcgattacggcgaaaacgaaaaacccctgttccgcgtcaacgccggcatgcccattgaggaagcgttagagcacgcctccaccctgcttttctactccaagaaactcgcgatggaagccgccatggatgtacgcggcgagcaatacgcgtgggccgcgcattacctgtgtgagatgggcaaagccgtcgttgatgacctgacccaagccatgacgccaagccgttaagcgcacgcagctcaaatgtgggagggggcttgcccccgatggcggagtgtcagaaccccatgtactggctgacccgcagctatcgggggcaagccccctcccacattttgattgcatttcaggttgggactgggcgaaacctatcagtccgcaatcaccacaatcgacacccgccgattctccgtgcgccctgccgccgtatcgttggacgccaccggctcgctgctacccagcccgcgcagttgaatgttttcttccttcatacctacaccggtcaacaccgtcgccacgctttttgcgcggcgcagggacagttgctggttgtaggtttccttgccggacgcatcggtgtggccgtcgacgcgcacgcgttcgatgcccacgcccagcagggctttgccgatgcgttggacgatgtcggtgctgggttggttgagcgtctcgacgtcgctgccaaacagcactttgccggacaggccgaaggcccagccttcgtcggtcagttcaaagccttgctgcttgaggaccgcgacttgtgccggagtgaggcctttgggtggggcggtctggcaaccgccgagggcgagcagtgccatcagcagggtgataaacatgaagcgcgcggttgtgaacaaggggtcaactcctgtgttgaacgttgacgacggggttctccgactccgccgtttgctggccgcccgaggacaagcgcttggcctggtacatcgccgcgtcggcggcattgagcaaggtgccaggtgtggcgccatgatcggggtagatagcgatgccgatactgagggaggtcaatacctgcgtgttgccgggcacagggatgggcaggtccatgctggcgatgatcttgtcggcgatacgctgcgcgtcttccaccttgtgcaacggcgccagcaggatggcgaactcgtcaccgcccaggcgcgcgaccaggtcatcctcacgcagttgagcacgcacgcgctcggccaccgctacgagaacggcatcgccggcggcgtggccgaagctgtcgttgatctctttgaaacggtcgctgtcgaggtagagcaccgccagttgttccttggccttcgccgcactgcgcagcgcacggatcagacgcccttcgaagaaggcacggttgggcaggccggtgaggctgtcgtgattggcctggtgggcgagggattcgttttcgctttgcaggtggttttgccaggcttccatctcgccgagcaaggcattgaagtcgctgcccaggctgtccaactcggcgattcgcgccggcggcacgcggcggtcgaagtcgcgctcgctacgggcagcgtgggccacggcggcgaggctttgcagtgggccggtgataccgcgcaacaagcgtcgcgccaagtgcagagcgatccaagcactgagcgcggtgcagatgaggatcccggccaggccgctgagcaggaagcgcaagaggctaccgccgtgaccggtgaggtgagtgctgccgatggctcgcccttggtggaggatcggctggctaatgggttgttcaagcagggtgtgcgccagttccagttcaacccgcgagagcatgccggtatccggacgtatccactgcgccagcaacttgccattggcgtcgaagacttcggcctgggccacttcttcggtggaggcgatcaggctgagggcctcggtggccgccgcgctgtcgttgaacaccaccgccgcttccacggtgtagttgatggagcgggcgatcaggtgcaggttgtgttcggcatacacccgcaacgccagcacgcccagcagggtcagcgagatgctggccagggtcaccgccaccagtgccagcatcaggtgccctcggccgatgaccgagcgcaatgtcggtcgcacagtatcggccctcatggcgcaggcgctcggcgacgggacaactgcagcacactggggtgaatacgcacgccgctgcgcgccacggagtcgaggttgacctcaaaggacacttgctcatcactcaccctaaggcagaacaggctacccacggtgcactggtcgccgccttcgctgatgctgagcaccgggtgaccgatcaaggaggtgaacaactggctacgctcatcgacactgagcttgccgatgtacaccgcatcgcacgcgttgacgatatcgggatggttggccagcaggcgctgcaccaccaccggacgaccggtggcctgggtggtgcctttgatcaggtcgtcggtgtattgggtggggccgacgatgcacaggcgcaattgcgcaggctcgaccggccagcgcgcataactgaggataccgagtaccacttgggtgactgcctgggcgcgctgggcggcgaggtccgcaggggcgggcgcctgggcgaaggtgtgtggcgcgagcacacacagcaccgccaccagcagcaggcgtctccagctcaaactgcgctctgtgggcgagacagccacgttcatgcagcgattctctcaggtgttttttagatgatgccgcaacgatagcacagcggcgcaaaaccccgcgaagagtaggccttcgcgggggccgctatttttccagaaaaatcagtcgactgaatcagaaaaatgacatgacctgtcagtcagttttttccggttcgtggcctaattccagcatcaacccactcaagcgcttgaccttgcgcctgaccgcctcttcaaacacgccgcctcggggctcgatcaggctgaaccagcgcttggcccgcgtgatgccggtatagatcaattctttggtgagcaccgggttcaatgcatccggcaggatcaatgcggtgtgggtgaactcggagccctgggatttgtgcacggtcatggcgtacacggtttccacatcgttcagacggctaggcagcacaaatcgcacaccgccctgaccgtcgttgcgtgggaaggcaacgcgcagcacctgggggccgccgtcgctttcgggcaatttgagggcgatgccgatatcgccgttcatcaggcccaggccgtagtcgttgcgggtcatgagtaccgggcggccttcgtaccactgctcgtcgccttcgatcaaacgcaccttgcgcagggcggcagtgatgcgcaggttcaggccttccacgccccaagggcctttgcgtaccgcgcagagcagttggaatgcatcaaaggcgtgcagcagttgttgcgcccagtgggtccaggcgtcgctttcgcgcggggtatcaagtgacggacgggcgctttgcagcaggttcaggtaatagcgataaccgtgggcaccatcaccctgcccgtccagcaccaggcgctccagggcgtggtcgtgctcgcccttgaggctgatgcagaacaggtcactgtgactgcgcgccgccagcagcttgcgcgcctcttcggcattttgctggttgacccaacgcgccagttggccgatgccactgccctcgccgaaacgccgcgagtaacgcagcatcaccacttgttgggccaacgggtggctggcgtcgaggtcttcctgcaggccgctggcgctgaggtcttcgccgctgaccgattgcagccattggcgggtctcggcgctgtagaagccagcttcggcgtcgcggcacaagtcaccgagcacggcgcccgcctctaccgaagcgagttggtccttgtcacccagtagcaccaggcgtgcatggggcggcaaggcgtcgagcaggttggccatcatttccaggtcgatcatcgaggcttcgtccaccaccagcacatccaaaggcagcgggttaccgaggtggtggcggaagtgccgcgtgcccgggcggctgcccagcaggcggtggacggtggtgacctgggtcgggattttttccttcacgttgtccggcacattcagcgacagcacttgctggctgatggactcggtgaggcgtgcggcagccttaccggtgggcgcggccaggcgaatgcgcaacgggctgccagcctcaacggccggcgcttgcagcaacgcgagcaggcgcaccacggtggtggtcttgccggtgccggggccaccggtgacgatgctgaatgcaccgcgagtggccagggcgcaggcgagtttttgccagtcgatcacgccgtccggcggcgcctggtcgaacaaactgttcaagcgctgcggcaaatcggcggcgactttttcctgggtggcgaggcgcaggcgcaaggcgctatcgatgcgccgctcgtaggtccagtaacggcgcaggtacaggcgtttgccggacaggaccagtgggcgactctgggcggattcgctgccatcggccgccaacgcgaccaaatgactggcggccaaagcgtggcaccagtgggcgccgtccagcccctccagcaactgcgacggcagcagcatggcgccggtttgcaggtcaccttcaggcggcaacgacagggcgaagtcgggtgccttgagcgtttcgaacaggtcgaggcagacgtgaccatggcccaattgatggctggtcagcgcggcggccagcagcaccagcgggtcagtctgtgggtcgagttcgtgcaggaagccgacgaaggctttgtccaacgcacgcaaccaaccgcgatcgacccaacgctccagcaattgcaccaggtcggcggcgcggctgaggggcgtcagctcctcaagcggtaacggcgacaggctcataacagcactccttgttcccaggcgggctcaaccttgggcgggatgggcttgccctggaacagcaggtcgaggctttcgatgagctctcgtgggggccgggtgaaatacgccccctggctagcggattgagtgccgcgcaggaaaatgtacagcgcaccaccgacatggcggtcgtagtcgtagtccggcaggcgcgccttgagttggcggtgcagggccagcaggtaaaggacgtattgcaggtcgtaccgatgctcaaggatcgactgttccatggcgtccggtgtgtaggcggaatcgtcggggccgagccaattggatttgtaatcggccacgtaatagcggccgccgtgctcgaaagtcaaatcgataaagcccttgaacataccgttgagcaacaccggttcggcggcaacgcgggagacgccgttgtgggtgtattggcatacaagcttgtcgagggcgagtacgtcgactttgtggctggcgaaccagaactccatctcgatctggtactgctgcaacccgctgagggaaacgtgaccgttttccaccggcaatggcgtttgcagcaggtggccgagccagctgctgagggtgatgatccagccttcccaattgcgccggttgcagcgagcgcccaccgccttttcgattgcctcgggcgtaacgttaaaaccgtcctccccggcccattccagcaggccgtgcagaaaggttcctgggttagggccgcgtgggaaacggtgaatatcgccgccggacgccaccacttcgcggggtgcgtcggggtcgagacgctcgtcatcgaacagcttttgggcctgtgggctttccggtgcttcgagaggggcggcgctcatgctgtcgccgatgcgcaaggcgctgtaggaagcaatccaccagttttccgccgccttacgcttgggcaacaagggcgcccgcagtgtggcgacgttaagcggtggatggaaaaggacgtcttgcgcttcgggcaccagggcgtagttgattgcagtgcaaccttcttgaaggtccaggagccagcccgccaaaccggcggattcacccagcgatgcgccggcgccaagcaaatagcccagtgccgaaaggtgcagtacggagctattgctattgccgcgcttgaggtcggcgatgcccagccaacaggcatgtttagcgcgggtcagggcgacgtagaacagacgcaggtcttcggcgaggcgctcgttgtcggccttggcgatcaactcgggcgtcgggcgcaggctgacctgggatttgccgttttcatcatggtagtgaaggggtaagcggctgccatccacgggtttggctgagcaaatgaatggcaggaaaaccagatcgtattccaggcctttggacttgtggatagtcaccactttgaccagttgctcatcactttccaggcgcaggatctgttcctcgcctgcctggcccgaaagcgccaggtgttcggccagatggcggatcagcgcctgttcaccgtcaagctccgatgcggcctgttgcagcagttcgctgaggtggagcaggttggtcagcacacgttcgccatcactgcgcgcgatcagggtttgcggcagtttgaagtcatgcagcaagcgccgcagcatcggcagcacgccttgggtgcgccagattgcgcgatagccacggaactgcatgacgcggctttcccacgccagttcgtcctggttcagacgctccagttccggcaaagacaggttcagggtgacgcaggccaacgcggcacgcagcgggcgctccacgtccggttcggcgcaggccttgagccaggccagcaggtcgtgggcttcctgggcggcgaagaccgaatctttgtcggacaggtaaacactgcgcacacctcgggcagccagttcggcgcgcaccgcctgggcttccttgccgtcgcgcaccaggatggcaatgtttgacggcagcacgcctttgaagctcgcgtccggttgcaggaaaccggcagtgccttgttgcccaccgttgagcaattcaacaatgtgcgtggcacaggccgccgcaagttgctgacgatacagcacgttggaaatcggctgatcggtaggcaagtgccagaggttcaacgccggcaacgtgtgcccatcgacctgcaagtgttccttgcggccttgggacagcaccgaatggaacggcacggggttttcgccatccggctcgcggaacaggaacgcacctcggcccgtttccgcacgctggaacacatggttcaccgcctcgaccatcgcatggctggagcggaagttggtacccagggtgtgatggcggccggtggtggactggcgggcgcgcaggtaggtgtagatgtcggcgccacggaaggcgtagatcgcctgcttggggtcgccgatcaggaacaggccgctgtcgaggtggttttcttcgatgcggtagatgctgtcgaagatgctgtattgcaccgggtcggtgtcctggaattcgtcgatcaacgccaccgggaactgctcgcggatcacgctcgccagacgctcgcctccctcggattgcagggcagcattgaggcggatgagcatgtcgtcgaagcccatttcggcgcgtcgacgcttttcctcttcgaagcgtttgccgacccagccggcggcgtgttgcaggactgcggcatcgggcgtcggcagggcgtcgagggcggccttgaggctggccatcgcgtcgataccgggatgctgcggcggttcgcccttccaggcttcggccatgccgtcgggtgtcaggcgagtgaagccggtgccgatatcgagttgttcgagggtgtcgtcagcagcccaggcgctgatcttatcgaaccagggctcgaagtaacgggcttgcatcttgcgaccatcgacggctttggccgccacggcttgcaggcagatatcacgtagctcggcggcccattgctgccacggcgccttcagttgtaccagcgcttcacggcgttcttgcaggcaggcgttgatcagctcggcgggctcgcgggtctcatcggcgggccgttcgctgccgaacagcgcacgtacccgaggcatcaacgcggcgggcccgccccagttgttgcgcacccagttgagcgcatcgtcgtgcatcgggtagcagaacagccgccagtagtcgcgcagcacttcaccaagcaggtcgctgtggtcggtttccagggtctgggtgaacaggctgccactgtcgaaggcgtgctcgcgcagcatgcgctggcaccaactgtggatggtcgaaacggcggcttcgtccatccattgcgcagcgatgtccaggcggttgccgcaggcgggccattgttcgagcgggtattcatcgcgtagatcggcgatcagagcgtcgggctgttcaatttcttcgcggaagaagcgtgctgcttcagccaggcggatgcggatgcgttcgcgcagctctttggtggcagcatcggtgaaggtcactaccaggatttgcggcggcagcagttcgcggtcaaagcctgattcatcgccaccgtggccgaggaccaggcgcaggtagagggcggagatggtaaaggtcttgccggtgccggcgctggcttcaatcagctggctgccgttgagcgggaaggccagggccaagggtttgcgggtcatgcgccggcctcctcaccggtgagtgatcgccagggggcgttgagcagggggcgatacagggtttcgcaccatccttcgaattcttcgctggcgatgagtgtggcgtagtcggggaattgccgggtgagcgctggggtttcgcggcgctcgccttcgttattgagcccgtcaccttcataggctttactcgcagccgcttcggccttggctggatcggtttggccgagccacgcaaacgcggttttgacggcaaggggtagcggtttgctcatccctgtatgccaggccagcagtaggttgccgaggatttcctgggcatgggctcgatccagcggtggcagcagcaaggtgtcgtcgctggccaccaaggcggtgcttagcggcaggccgcaggcgcaggccactacgtgattgacccagggccgaatcaggcgatgccacttgcgggtcttgatcgaaccgatgctgttggggatggtggtgacgctcagcaacccgccatcactgcgtcgatgcagcccgctgatccagccttccaactgaatgccgcgatgctcaaaactgatcggctcggcgccggggtgcggggtgggccagagggccaataattgttggtagcgttgcagcaggccaggcaagggttcgatcagttcgttgcgcaggcactcgccgaaacccaccatcggcaacaggccactgccttgtaggcgcaaagcctgggcgttcagggcctggtcgaagtgatcgggctcggtgagtgctgcgctaagcagactgtcgctcaggctgtagcgttgcagtgcgtcgagcacgaagggttcttcgtcagccagcggtacttcggcggcctcgaagaacactttcagccgttggctgaagaagtgtttgaccgggttacgcaggaagtcctgaagctggccgaggttcaggggctcgtcctgttgatgaggtgccaggacgggttctgttgcggtggcatcggctgcctcgtggagcaactgccattcgcgggcatagctgaacagcacatcgccctcatggaagtagcgagcgctgaatggttgcagtgggtgctcttgagtcatggcatcgatcagcggctcgtcactgtcagcggagtgccagccactggccagatggtcacgcagttggccgatcaacaccgaggccgggcgatcactgttgtcgcgaatgctgcggccaacccagctgatatagagctggtcacgggctgaaagcagcgcttcgagcagcaggtagcggtcgtcttcgcggcgtgaacgatcaccggggcggtagtcactgcccatcaggtcgaagtccagcggtggttgagcgcgcgggtaatcgccgtcgttcataccgagcaggcacaccagcttgaagggaattgcacgcatgggcatcagtgtgcagaaattgacagccccggcgaggaagcgttgggacaggcgcccttgatccaaacccgccaaccaggcttcacggactacggtgaggggtaagtcatcgtacaggccaacggactcgcaggtttccagccacgtttctctgagttgttcgagttggcccaacaggtagtcgtcgtgttcgctactcggcaggaaaaacagttgcatcaagcgttgcaggcgttcaccccactccttggcgggagcgggttgcgacagggcttggtgcgcatcgttgagtgcgtcgagcaaggcgaccaacgggccgatcaggacagcgtcgagtccaccgatttcgtcgtaaggctcgataccggcgcacgctgcgccggtgcctacggcgtaaccgagtaacatgcggcgcaagccgaaacgccaactgttttgctccagctccgttggcaggccgaggccggcacgttgctcggcgttgagcccccagcggatgccggcgccttcgatccagcggtgcaacgtgggcaggtcgcgctccttgatggcaaagcgttcgcgcagtgctggaacgtcgagcaagtctagaatttcgctgacggggaagcggctgtcggggagtttcagcaggtgttcgacggcaatcagcagagggtcgcggccgcgttggccttggtcggtcagggtgaacgggatgaagcgtgggtcgttgcgctcaagctggccgaacacggcgcggatatgcggcgcgtagctgtcgacgtcggggaccatgacgatgatgtcccgggggcgcagcgtggggtcggcgctgaagcgttggagcagttggtcgtggaggatttctacttcgcgttgggcgctgtgggcgatgtggaagcggattgaggtatcgcgctccagatccacggcgggccatagctcgcgggtttcattgagtgggcgcagttcgaggatatcgtcctggagttgattgagcagtgttgtcggctcgctgtcgctgaacaggtcgatgcgaccgtcgcggaaagcggcgcggtagctgttggggtcgtcatagctgtccagcaagctgatgtagtcacgaccttgtttgccccacgcggccaataacggatgggcatgctggtgcagggtttgtgggtcgatggtgaccggcatgcccgctttacgcgcctgacgcttgtattcgttacgcagcaggtctttgtcggcgacgatgtcagaccaatggtgtcggcaagggttgtgcacacagagcaggacttggctgaagcgcgcgaggccggcgagggcttccagcgcctgggccggcaacgaggagatgccgaaaacgatgacgcgggatggcaggccctcgggcgctttttccagggtattgatgcgctcgataaagcgttggtgaacgcctgcgcgactttcggccatgccttcttcaccaacatccaatagcagcgcgcgccatagttcggcttgccagcagttggctgggttaaggggtttggattcacctcgaccgttacgcaactggtggcggccggcggcccagtcttccagccagtcggcgcggtagacctggtattggtcgaacaggtcagccaggcgctcggcgagttggtagcgtttacgcaggtcggtgtcgtgggtgaggaagcgctgcaacggttcgaagtgcggctgatcgataagctccgggagcaggcgcatcaggcgccaagtcagtggggctttatcgagcagggatttgggcgggatttcatctttgcccaagaccatgcggtagagctgccacataaagctgccgggcagttgaacatcgattgctgcggcgatgccgcaaccgcccatgtcgtcgtcttccggatcttcagccagggccagcttgagccactgggcgatgccattgctttgtaccagggcgatttcgttttccaagggtgccaaggggtagcggcgcatccaactgaccactaggctgcgaagctcgtccaggcggttgccgtgaaccaccatgaatccagcactaagggacgtcgcatccggcataacggcttccttgggaaaggcaaaatcgagggtgcgactttagcactgtggacagttgttggccgaattgggatgttagctgtcttttcgaccgcccaaaacaaaacccctgactgcgttagcagtcaggggttctggaatttaatcttgacgatgacctactctcacatggggaaaccccacactaccatcggcgatgcatcgtttcactactgagttcgggatgggatcaggtggttccaatgctctatggtcgtcaagaaattcgggtactgagtcgtggcctaggcctcgcttcagcaaattgggtatgtgacagctttcggtgttttgtgaacgtcgaactttcggttcatttcgtcttcacacaccgcaatctgatgctcgttagagtagtcaaattgcttgggtgttatatggtcaagcctcacgggcaattagtattggttagctcaacg
